(19) United States
(12) Patent Application Publication
(10) Pub. No.: US 2017/0326229 A1
(43) Pub. Date: Nov. 16, 2017

(54) SWARM IMMUNIZATION WITH 54 ENVELOPES FROM CH505

(71) Applicants: Duke University, Durham, NC (US); Los Alamos National Security, LLC, Los Alamos, NM (US)

(72) Inventors: Barton F. HAYNES, Durham, NC (US); Bette T. KORBER, Los Alamos, NM (US); Peter T. HRABER, Los Alamos, NM (US); Hua-Xin LIAO, Durham, NC (US)

(21) Appl. No.: 15/514,265

(22) PCT Filed: Sep. 29, 2015
(86) PCT No.: PCT/US15/53004

§ 371 Date: Mar. 24, 2017

Related U.S. Application Data
(60) Provisional application No. 62/056,822, filed on Sep. 29, 2014.
(60) Provisional application No. 62/150,019, filed on Apr. 20, 2015.

(51) Int. Cl. A61K 39/21; C12N 7/00; C07K 14/005; A61K 39/00

(52) U.S. Cl. CPC A61K 39/21; C12N 7/00; C07K 14/005; C12N 2740/16022; A61K 2039/5256; A61K 2039/53; A61K 2039/575; C12N 2740/16034; C12N 2740/16043

(57) ABSTRACT

In certain aspects the invention provides HIV-1 immunogens, including envelopes (CH505) and selections therefrom, and methods for swami immunizations using combinations of HIV-1 envelopes.

[0001] This application claims the benefit of and priority to the U.S. Provisional Patent Application No. 62/056,822, filed on Sep. 29, 2014, and U.S. Provisional Patent Application No. 62/150,019, filed on Apr. 20, 2015, the contents of each of which are hereby incorporated by reference in their entirety.

[0002] This invention was made with government support under Center for HIV/AIDS Vaccine Immunology-Immunogen Design grant UM1-AI100645 from the NIH, NIAID, Division of AIDS. The government has certain rights in the invention.

[0003] All patents, patent applications and publications cited herein are hereby incorporated by reference in their entirety. The disclosure of these publications in their entireties are hereby incorporated by reference into this application in order to more fully describe the state of the art as known to those skilled therein as of the date of the invention described herein.

### TECHNICAL FIELD

[0004] The present invention relates in general, to a composition suitable for use in inducing anti-HIV-1 antibodies, and, in particular, to immunogenic compositions comprising envelope proteins and nucleic acids to induce cross-reactive neutralizing antibodies and increase their breadth of coverage. The invention also relates to methods of inducing such broadly neutralizing anti-HIV-1 antibodies using such compositions.

### BACKGROUND

[0005] The development of a safe and effective HIV-1 vaccine is one of the highest priorities of the scientific community working on the HIV-1 epidemic. While anti-retroviral treatment (ART) has dramatically prolonged the lives of HIV-1 infected patients, ART is not routinely available in developing countries.

### SUMMARY OF THE INVENTION

[0006] In certain embodiments, the invention provides compositions and method for induction of immune response, for example cross-reactive (broadly) neutralizing Ab induction. In certain embodiments, the methods use compositions comprising “swarms” of sequentially evolved envelope viruses that occur in the setting of bnAb generation in vivo in HIV-1 infection.

[0007] In certain aspects the invention provides compositions comprising a selection of HIV-1 envelopes and/or nucleic acids encoding these envelopes as described herein for example but not limited to Selections as described herein. Without limitations, these selected combinations comprise envelopes which provide representation of the genetic (sequence) and antigenic diversity of the HIV-1 envelope variants which lead to the induction and maturation of the CH103 and CH235 antibody lineages. In certain embodiments, these compositions are used in immunization methods as a prime and/or boost as described in Selections as described herein.

[0008] In one aspect the invention provides selections of envelopes from individual CH505, which selections can be used in compositions for immunizations to induce lineages of broad neutralizing antibodies. In certain embodiments, there is some variance in the immunization regimen; in some embodiments, the selection of HIV-1 envelopes may be grouped in various combinations of primes and boosts, either as nucleic acids, proteins, or combinations thereof. In certain embodiments the compositions are pharmaceutical compositions which are immunogenic. In certain embodiments, the compositions comprise amounts of envelopes which are therapeutic and/or immunogenic.

[0009] In one aspect the invention provides a composition comprising any one of the envelopes described herein, or any combination thereof (selections in Examples). In some embodiments, CH505 transmitted/founder (T/F) Env is administered first as a prime, followed by a mixture of a next group of Envs, followed by a mixture of a next group(s) of Envs, followed by a mixture of the final Envs. In some embodiments, grouping of the envelopes is based on their binding affinity for the antibodies expected to be induced. In some embodiments, grouping of the envelopes is based on chronological evolution of envelope viruses that occurs in the setting of bnAb generation in vivo in HIV-1 infection. In some embodiments Loop D mutants could be included in either prime and/or boost. In some embodiments, the composition comprises an adjuvant. In some embodiments, the composition and methods comprise use of agents for transient modulation of the host immune response.

[0010] In one aspect the invention provides a composition comprising an HIV-1 envelope polypeptide or a nucleic acid encoding an HIV-1 envelope selected from the group consisting of M5, M6 and M11, or any combination thereof, wherein the HIV-1 envelope is a loop D mutant envelope.

[0011] In another aspect the invention provides a method of inducing an immune response in a subject comprising administering a composition comprising HIV-1 envelope M11, M6 and/or M5 as a prime in an amount sufficient to induce an immune response, wherein the envelope is administered as a polypeptide or a nucleic acid encoding the same. A method of inducing an immune response in a subject comprising administering a composition comprising any one of the HIV-1 envelopes in Table 1 or any combination as a prime in an amount sufficient to induce an immune response, wherein the envelope is administered as a polypeptide or a nucleic acid encoding the same.

[0012] In certain embodiments the methods comprise administering a composition comprising any one of HIV-1 envelopes polypeptides selected from the group consisting of w000.TF, w020.15, w030.13,w020.25, w004.54, w020.11, w078.15, w053.22, w136.B23, w053.31, w136.B2, w100.A13, w100.B4, w160.T4, w030.21, w053.15, w078.17, w136.B10, w053.29, w078.33, w136.B5, w030.36, w030.17, w078.9, w030.20, w100.B2, w078.6, or any combination thereof as a prime.

[0013] In certain embodiments the methods comprise administering a composition comprising any one of a nucleic acid encoding HIV-1 envelope selected from the group consisting of w000.TF, w020.15, w030.13,w020.25, w004.54, w020.11, w078.15, w053.22, w136.B23, w053.31, w136.B2, w100.A13, w100.B4, w160.T4, w030.21, w053.15, w078.17, w136.B10, w053.29, w078.33, w136.B5, w030.36, w030.17, w078.9, w030.20, w100.B2, w078.6, or any combination thereof as a prime.

[0014] In certain embodiments the methods comprise administering a composition comprising any one of HIV-1 envelopes in Table 1 or any combination thereof as a boost, wherein the envelope is administered as a polypeptide or a nucleic acid encoding the same.

[0015] In certain embodiments the methods comprise administering a composition comprising any one of HIV-1 envelopes polypeptides selected from the group consisting of w000.TF, w020.15, w030.13,w020.25, w004.54, w020.11, w078.15, w053.22, w136.B23, w053.31, w136.B2, w100.A13, w100.B4, w160.T4, w030.21, w053.15, w078.17, w136.B10, w053.29, w078.33, w136.B5, w030.36, w030.17, w078.9, w030.20, w100.B2, w078.6, or any combination thereof as a boost.

[0016] In certain embodiments the methods comprise administering a composition comprising any one of a nucleic acid encoding HIV-1 envelope selected from the group consisting of w000.TF, w020.15, w030.13,w020.25, w004.54, w020.11, w078.15, w053.22, w136.B23, w053.31, w136.B2, w100.A13, w100.B4, w160.T4, w030.21, w053.15, w078.17, w136.B10, w053.29, w078.33, w136.B5, w030.36, w030.17, w078.9, w030.20, w100.B2, w078.6, or any combination thereof as a boost.

[0017] In certain embodiments, the compositions contemplate nucleic acid, as DNA and/or RNA, or proteins immunogens either alone or in any combination. In certain embodiments, the methods contemplate genetic, as DNA and/or RNA, immunization either alone or in combination with envelope protein(s).

[0018] In certain embodiments the nucleic acid encoding an envelope is operably linked to a promoter inserted an expression vector. In certain aspects the compositions comprise a suitable carrier. In certain aspects the compositions comprise a suitable adjuvant.

[0019] In certain embodiments the induced immune response includes induction of antibodies, including but not limited to autologous and/or cross-reactive (broadly) neutralizing antibodies against HIV-1 envelope. Various assays that analyze whether an immunogenic composition induces an immune response, and the type of antibodies induced are known in the art and are also described herein.

[0020] In certain aspects the invention provides an expression vector comprising any of the nucleic acid sequences of the invention, wherein the nucleic acid is operably linked to a promoter. In certain aspects the invention provides an expression vector comprising a nucleic acid sequence encoding any of the polypeptides of the invention, wherein the nucleic acid is operably linked to a promoter. In certain embodiments, the nucleic acids are codon optimized for expression in a mammalian cell, in vivo or in vitro. In certain aspects the invention provides nucleic acids comprising any one of the nucleic acid sequences of invention. In certain aspects the invention provides nucleic acids consisting essentially of any one of the nucleic acid sequences of invention. In certain aspects the invention provides nucleic acids consisting of any one of the nucleic acid sequences of invention. In certain embodiments the nucleic acid of the invention, is operably linked to a promoter and is inserted in an expression vector. In certain aspects the invention provides an immunogenic composition comprising the expression vector.

[0021] In certain aspects the invention provides a composition comprising at least one of the nucleic acid sequences of the invention. In certain aspects the invention provides a composition comprising any one of the nucleic acid sequences of invention. In certain aspects the invention provides a composition comprising at least one nucleic acid sequence encoding any one of the polypeptides of the invention.

[0022] In certain aspects the invention provides a composition comprising at least one nucleic acid encoding HIV-1 envelope from FIG. 2 or any combination thereof. Non-limiting examples of combinations are shown in Example 2.

[0023] In certain aspects, the invention provides a composition comprising any one or at least one nucleic acid encoding HIV-1 envelope selected from the group consisting of w000.TF, w004.31, w004.54, w007.8, w007.21, w007.25, w007.34, w008.20, w009.19, w010.7, w020.15, w020.11, w020.24, w020.25, w022.6, w022.5, w022.9, w022.22, w030.20, w030.17, w030.21, w030.36, w030.26, w030.13, w030.32, w053.15, w053.29, w053.22, w053.8, w053.31, w053.9, w078.6, w078.36, w078.9, w078.26, w078.29, w078.30, w078.33, w078.17, w078.15, w078.27, w100.T3, w100.B10, w100.B2, w100.B4, w100.A11, w100.A13, w136.B10, w136.B5, w136.B2, w136.B23, w160.C1, w160.T3, w160.T4, or any combination thereof.

[0024] In certain aspects, the invention provides a composition comprising any one or at least one of the nucleic acids encoding HIV-1 envelope selected from the envelopes in FIG. 34 (57 envelopes from CH505).

[0025] In certain aspects, the invention provides a composition comprising any one of or at least one an HIV-1 envelope polypeptide selected from the group consisting of w000.TF, w004.31, w004.54, w007.8, w007.21, w007.25, w007.34, w008.20, w009.19, w010.7, w020.15, w020.11, w020.24, w020.25, w022.6, w022.5, w022.9, w022.22, w030.20, w030.17, w030.21, w030.36, w030.26, w030.13, w030.32, w053.15, w053.29, w053.22, w053.8, w053.31, w053.9, w078.6, w078.36, w078.9, w078.26, w078.29, w078.30, w078.33, w078.17, w078.15, w078.27, w100.T3, w100.B10, w100.B2, w100.B4, w100.A11, w100.A13, w136.B10, w136.B5, w136.B2, w136.B23, w160.C1, w160.T3, w160.T4, or any combination thereof.

[0026] In certain aspects, the invention provides a composition comprising any one of or at least one an HIV-1 envelope polypeptide from the envelopes in FIG. 34 (57 envelopes).

[0027] In certain embodiments, the compositions and methods employ an HIV-1 envelope as polypeptide instead of a nucleic acid sequence encoding the HIV-1 envelope. In certain embodiments, the compositions and methods employ an HIV-1 envelope as polypeptide, a nucleic acid sequence encoding the HIV-1 envelope, or a combination thereof.

[0028] The envelope used in the compositions and methods of the invention can be a gp160, gp150, gp145, gp140, gp120, gp41, N-terminal deletion variants as described herein, cleavage resistant variants as described herein, or codon optimized sequences thereof. In certain embodiments, the envelope used in the compositions and methods of the invention is gp160. In certain embodiments, the envelope used in the compositions and methods of the invention is gp150. In certain embodiments, the envelope used in the compositions and methods of the invention is gp145. In certain embodiments, the envelope used in the compositions and methods of the invention is gp120. In certain embodiments, the envelope used in the compositions and methods of the invention is gp41. In certain embodiments, the envelope used in the compositions and methods of the invention is a gp120 variant. In certain embodiments, the envelope used in the compositions and methods of the invention is gp120D8 variant.

[0029] The polypeptide contemplated by the invention can be a polypeptide comprising any one of the polypeptides described herein. The polypeptide contemplated by the invention can be a polypeptide consisting essentially of any one of the polypeptides described herein. The polypeptide contemplated by the invention can be a polypeptide consisting of any one of the polypeptides described herein. In certain embodiments, the polypeptide is recombinantly produced. In certain embodiments, the polypeptides and nucleic acids of the invention are suitable for use as an immunogen, for example to be administered in a human subject.

[0030] In certain embodiments the envelope is any of the forms of HIV-1 envelope. In certain embodiments the envelope is gp120, gp140, gp145 (i.e. with a transmembrane). In certain embodiments, the envelope is in a liposome and transmembrane with a cytoplasmic tail in a liposome. In certain embodiments, the nucleic acid comprises a nucleic acid sequence which encode a gp120, gp140, gp145, gp150 or gp160.

[0031] In certain embodiments, where the nucleic acids are operably linked to a promoter and inserted in a vector, the vectors is any suitable vector. Non-limiting examples, include, the VSV, replicating rAdenovirus type 4, MVA, Chimp adenovirus vectors, pox vectors, and the like. In certain embodiments, the nucleic acids are administered in NanoTaxi block polymer nanospheres. In certain embodiments, the composition and methods comprise an adjuvant. Non-limiting examples include, AS01 B, AS01 E, gla/SE, alum, Poly I poly C, TLR agonists, TLR7/8 and 9 agonists, or a combination of TLR7/8 and TLR9 agonists (see Moody et al. (2014) J. Virol. March 2014 vol. 88 no. 6 3329-3339), or any other adjuvant. Non-limiting examples of TLR7/8 agonist include TLR7/8 ligands, Gardiquimod, Imiquimod and R848 (resiquimod). A non-limiting embodiment of a combination of TLR7/8 and TLR9 agonist comprises R848 and oCpG in STS (see Moody et al. (2014) J. Virol. March 2014 vol. 88 no. 6 3329-3339).

[0032] In certain aspects the invention provides a method for selecting a swarm of HIV-1 envelopes, among a population of HIV-1 envelopes isolated over a period of time from an individual who develops bnAbs against HIV-1 wherein the swarm mimics the envelope diversity in a person who made a good antibody response during natural infection, by representing the relevant HIV diversity, capturing evolution of representative sites from within subject diverse populations.

### BRIEF DESCRIPTION OF THE DRAWINGS

[0033] To conform to the requirements for PCT patent applications, many of the figures presented herein are black and white representations of images originally created in color. In the below descriptions and the examples, the colored images are described in terms of its appearance in black and white. Different colors are described by different shades of white to grey with an attempt to match the description the descriptions of the color as closely as possible to that of the figures. The original color versions of some of the Figures can be viewed in Liao, et al., Co-evolution of a broadly neutralizing HIV-1 antibody and founder virus. Nature. 2013; 496 (7446): 469-76 (including the accompanying Supplementary Information) and Haynes et al., B-cell-lineage immunogen design in vaccine development with HIV-1 as a case study. Nat. Biotechnol 2012; 30: 423-33 (including the accompanying Supplementary Information). For the purposes of the PCT, contents of Liao, et al. (2013), including the accompanying “Supplementary Information,” and the contents of Haynes et al. (2012), including the accompanying “Supplementary Information,” are each herein incorporated by reference.

[0034] FIG. 1 Shows show Heat Map of Binding (log Area Under the Curve, AUC) of Sequential Envs to CH103 CD4 Binding Site Broadly Neutralizing Antibody Lineage members. Numerical data corresponding to the graphic representations in these figures are shown in Table 1.

[0035] FIG. 2 shows 27 (bolded) envelopes, among a selection of 54 envelopes, tested for binding to CH103 CD4 Binding Site Broadly Neutralizing Antibody Lineage members as shown in FIG. 1.

[0036] FIGS. 3A-3C shows the genotype variation (FIG. 3A), neutralization titers (FIG. 3B), and Envelope phylogenetic relations (FIG. 3C) among CH505 Envelope variants. The vertical position in each panel corresponds to the same CH505 Env clone named on the right side of the tree. Distance from the Transmitted/Founder form generally increases from top towards bottom of the figure. In the FIG. 3A, sites not colored correspond to the Transmitted/Founder virus, dark grey sites show mutations, and black sites correspond to insertions or deletions relative to the Transmitted/Founder virus. Additional annotation indicates the known CD4 binding-site contacts (short, vertical black bars towards top), CH103 binding-site contacts for the resolved structure (short, vertical grey bars with a horizontal line to indicate the region resolved by X-Ray Crystallography), gp120 landmarks (vertical grey rectangular regions, V1-V5 hypervariable loops, Loop D, and CD4 Loops), a dashed vertical line delineating the gp120/gp41 boundary, and results from testing for CTL epitopes with ELISpot assays (light grey horizontal bands at top and bottom show where peptides were tested and negative, and a light grey rectangle for the tested positive region outside the C-terminal end of V4). FIG. 3B depicts IC50 (50% inhibitory concentrations, in μg/ml) values from autologous neutralization assays against 13 monoclonal antibodies (MAbs) of the CH103 lineage and each of 134 CH505 Env-pseudotyped viruses. Grey Color-scale values indicate neutralization potency and range from gray (no neutralization detected) through dark grey (potent neutralization, i.e. <0.2 μg/ml; empty cells correspond to absence of information). The cumulative progression of neutralization potency from left to right, corresponding to developmental stages in the CH103 lineage, indicates accumulation of neutralization potency. Similarly, increased presence neutralization signal from top to bottom corresponds to increasing neutralization breadth per MAb in the CH103 lineage. In FIG. 3C is the phylogeny of CH505 Envs, with the x-axis indicating distance from the Transmitted-Founder virus per the scale bar (units are mutations per site). The tree is ordered vertically such that lineages with the most descendants appear towards the bottom. Each leaf on the tree corresponds to a CH505 autologous Env, with the name of the sequence depicted (‘w’ and symbol color indicate the sample time-point; ‘M’ indicates a synthetic mutant Env). The color of text in each leaf name indicates its inclusion in a possible embodiment. Three long, vertical lines to the left of the tree depict the phylogenetic distribution of envelopes in three distinct alternative embodiments (identified as “Vaccination Regimes 1-3”), with diamonds used to identify each.

[0037] FIG. 4 shows nucleic acid sequences of 26 six CH505 envelopes encoding gp160s. The nucleotide sequences of w004.31 (SEQ ID NO: 01), w007.8 (SEQ ID NO: 02), w007.21 (SEQ ID NO: 03), w007.25 (SEQ ID NO: 04), w007.34 (SEQ ID NO: 05), w008.20 (SEQ ID NO: 06), w009.19 (SEQ ID NO: 07), w010.7 (SEQ ID NO: 08), w022.6 (SEQ ID NO: 09), w022.5 (SEQ ID NO: 10), w022.9 (SEQ ID NO: 11), w022.22 (SEQ ID NO: 12), w030.26 (SEQ ID NO: 13), w030.32 (SEQ ID NO: 14), w053.8 (SEQ ID NO: 15), w053.9 (SEQ ID NO: 16), w078.36 (SEQ ID NO: 17), w078.26 (SEQ ID NO: 18), w078.29 (SEQ ID NO: 19), w078.30 (SEQ ID NO: 20), w078.27 (SEQ ID NO: 21), w100.T3 (SEQ ID NO: 22), w100.B10 (SEQ ID NO: 23), w100.A11 (SEQ ID NO: 24), w160.C1 (SEQ ID NO: 25), and w160.T3 (SEQ ID NO: 26) are shown. These are n26-nucleic acids-not-included in a previously described set of 90 envelopes.

[0038] FIG. 5 shows nucleic acid sequences of 28 CH505 envelopes encoding gp160s. The nucleotide sequences of w000.TF (SEQ ID NO: 27),w004.10 (SEQ ID NO: 28), w020.15 (SEQ ID NO: 29), w020.11 (SEQ ID NO: 30), w020.24 (SEQ ID NO: 31), w020.13 (SEQ ID NO: 32)n, w030.20 (SEQ ID NO: 33), w030.17 (SEQ ID NO: 34), w030.21(SEQ ID NO: 35), w030.36 (SEQ ID NO: 36), w030.13 (SEQ ID NO: 37), w053.3 (SEQ ID NO: 38), w053.29 (SEQ ID NO: 39), w053.31 (SEQ ID NO: 40), w053.16 (SEQ ID NO: 41), w078.6 (SEQ ID NO: 42),w078.9 (SEQ ID NO: 43), w078.33 (SEQ ID NO: 44), w078.17 (SEQ ID NO: 45), w078.15 (SEQ ID NO: 46), w100.B2 (SEQ ID NO: 47), w100.B4 (SEQ ID NO: 48), w100.A13 (SEQ ID NO: 49), w136.B10(SEQ ID NO: 50), w136.B5 (SEQ ID NO: 51), w136.B2(SEQ ID NO: 52), w136.B18(SEQ ID NO: 53), and w160.T4 (SEQ ID NO: 54) are shown. These are 28-nucleic acids included in a previously described set of 90 envelopes.

[0039] FIG. 6 shows sequences amino acids sequences of the nucleic acids of FIG. 4. The amino acid sequences of w004.31 (SEQ ID NO: 55), w007.8(SEQ ID NO: 56), w007.21(SEQ ID NO: 57), w007.25(SEQ ID NO: 58), w007.34 (SEQ ID NO: 59), w008.20 (SEQ ID NO: 60), w009.19(SEQ ID NO: 61), w010.7(SEQ ID NO: 62), w022.6(SEQ ID NO: 63), w022.5(SEQ ID NO: 64), w022.9(SEQ ID NO: 65), w022.22(SEQ ID NO: 66), w030.26(SEQ ID NO: 67), w030.32(SEQ ID NO: 68), w053.8(SEQ ID NO: 69), w053.9(SEQ ID NO: 70), w078.36 (SEQ ID NO: 71), w078.26(SEQ ID NO: 72), w078.29 (SEQ ID NO: 73), w078.30(SEQ ID NO: 74), w078.27(SEQ ID NO: 75), w100.T3(SEQ ID NO: 76), w100.B10(SEQ ID NO: 77), w100.A11 (SEQ ID NO: 78), w160.C1(SEQ ID NO: 79), and w160.T3(SEQ ID NO: 80) are shown.

[0040] FIG. 7 shows sequences of amino acids of the nucleic acid sequences of FIG. 5. The amino acid sequences of w000.TF(SEQ ID NO: 81), w004.10(SEQ ID NO: 82), w020.15 (SEQ ID NO: 83), w020.11(SEQ ID NO: 84), w020.24(SEQ ID NO: 85), w020.13 (SEQ ID NO: 86), w030.20(SEQ ID NO: 87), w030.17(SEQ ID NO: 88), w030.21(SEQ ID NO: 89), w030.36(SEQ ID NO: 90), w030.13(SEQ ID NO: 91), w053.3(SEQ ID NO: 92), w053.29(SEQ ID NO: 93), w053.31(SEQ ID NO: 94), w053.16(SEQ ID NO: 95), w078.6(SEQ ID NO: 96), w078.9(SEQ ID NO: 97), w078.33(SEQ ID NO: 98), w078.17(SEQ ID NO: 99), w078.15(SEQ ID NO: 100), w100.B2(SEQ ID NO: 101), w100.B4(SEQ ID NO: 102), w100.A13(SEQ ID NO: 103), w136.B10(SEQ ID NO: 104), w136.B5(SEQ ID NO: 105), w136.B2(SEQ ID NO: 106), w136.B18(SEQ ID NO: 107), and w160.T4(SEQ ID NO: 108) are shown.

[0041] FIG. 8 shows nucleic acid sequences of several M mutants encoding gp160. The sequences of >M5 (SEQ ID NO: 109), >M19(SEQ ID NO: 110), >M10(SEQ ID NO: 111), >M11(SEQ ID NO: 112), >M9(SEQ ID NO: 113), >M7(SEQ ID NO: 114), >M20(SEQ ID NO: 115), >M8(SEQ ID NO: 116), >M21(SEQ ID NO: 117), and >M6(SEQ ID NO: 118)nt are shown.

[0042] FIG. 9 shows amino acid sequences of several M mutants as gp160. The sequences of >M5(SEQ ID NO: 119), >M19(SEQ ID NO: 120), >M10 (SEQ ID NO: 121), >M11(SEQ ID NO: 122), >M9(SEQ ID NO: 123), >M7(SEQ ID NO: 124), >M20(SEQ ID NO: 125), >M8(SEQ ID NO: 126), >M21(SEQ ID NO: 127), and >M6(SEQ ID NO: 128) are shown.

[0043] FIG. 10 shows examples of amino acid sequences of CH505 D8gp120 constructs. The sequences of >HV1300531_v2 (M5) (SEQ ID NO: 129), >HV1300532_v2 (M6) (SEQ ID NO: 130), >HV1300533_v2 (M7) (SEQ ID NO: 131), >HV1300534_v2 (M8) (SEQ ID NO: 132), >HV1300535_v2 (M9) (SEQ ID NO: 133), >HV1300536_v2 (M10) (SEQ ID NO: 134), >HV1300537_v2 (M11) (SEQ ID NO: 135), >HV1300538_v2 (M19) (SEQ ID NO: 136), >HV1300539_v2 (M20) (SEQ ID NO: 137), >HV1300540_v2 (M20) (SEQ ID NO: 138), and >HV1300541_v2 (T/F) (SEQ ID NO: 139) are shown.

[0044] FIG. 11A shows nucleic acid sequence of T/F virus from individual CH505 (>CH0505.TF or SEQ ID NO: 140). FIG. 11B shows CH505 HIV-1 gene sequences. The nucleic acid sequences of GAG (SEQ ID NO: 141), POL (SEQ ID NO: 142), VIF (SEQ ID NO: 143), VPR (SEQ ID NO: 144), TAT (SEQ ID NO: 145), REV (SEQ ID NO: 146), VPU (SEQ ID NO: 147), ENV (SEQ ID NO: 148), NEF (SEQ ID NO: 149) are shown.

[0045] FIG. 12 shows loss of ancestral transmitted-founder (TF) amino acids in Envs from CH505. For 953 aligned Env sites, TF loss is proportion of non-TF variants per time-point sampled from the study participant CH505. TF loss is computed for each of 14 time-points sampled longitudinally, weeks 4 through 160, with the number of Envs sequenced (n) per time-point as shown. Bar colors vary over time to indicate 35 sites with at least 80% TF loss in any time-point, whether at peak TF loss, below peak but above the 80% cutoff, or below 80%. Sites not selected for further consideration, which remained below 80% TF loss throughout the study period, are also depicted (black bars). Grey boxes identify hypervariable loops and other gp120 landmarks; a grey line marks the boundary between gp120 and gp41.

[0046] FIG. 13 shows diversity of variant frequency dynamics within sites. The single TF virus (dashed lines) yields to putative escape mutations. Shaded regions show 95% confidence intervals for variant frequencies, computed from the binomial probability distribution, given the number of sequences sampled per time-point. Letters below each panel list variants in order of appearance. Numbers above each panel denote TF form, HXB2 position, and alignment column. For instance, “N279 [357]” indicates HXB2 279 (alignment column 357) and depicts loss of the transmitted asparagine. Lower-case letters denote insertions at the C-terminal end of the HXB2 site given. Colors indicate positive (medium grey) and negative (light grey) charges and “O” indicates a potentially gylcosylated asparagine (lighter grey). Hyphens (grey) indicate an insertion or deletion (indel). For clarity, variants that never reach 20% in a sample are not shown.

[0047] FIG. 14 shows cumulative distribution of peak TF loss over 953 aligned Env sites. Peak TF loss is the greatest proportion of non-TF variants in any time-point sampled, which corresponds to the minimum for each dashed line in FIG. 13. Of 953 aligned sites, 365 (38.3%) are invariant. 35 sites with at least 80% peak TF loss were selected for further study. Other cutoff values would yield more sites, e.g. 48 with 60% TF loss, or fewer sites, e.g. 15 with 100% TF loss.

[0048] FIGS. 15A-15G show selected sites that are localized to immunogenic regions on the BG505 SOSIP trimer (PDB 4TVP [46] Pancera M, Zhou T, Druz A, Georgiev I S, Soto C, Gorman J, et al. Structure and immune recognition of trimeric pre-fusion HIV-1 Env. Nature. 2014; 514(7523):455-61. doi: 10.1038/nature13808. PubMed PMID: 25296255). Selected sites are depicted as spheres, colored to indicate the timing of their emergence. FIG. 15A shows the side view, oriented with viral membrane towards bottom. FIG. 15B shows the addition of known immunogenic regions. FIG. 15C shows selected sites that are colored to show which immune pressures are known to have induced TF loss. FIG. 15D-15F show the top view, as seen from host cell membrane. FIG. 15G shows the key to the color scheme. Table 2 lists colored symbols for each selected site.

[0049] FIGS. 16A-16C show the variant frequency across 35 sites selected from CH505 Env gp160. FIG. 16A shows the variant frequencies among all 398 sequence sampled. Symbol height is proportional to amino acid frequency. Colors correspond to FIG. 13, and indels appear as grey boxes. Site order follows ranks listed in Table 2. FIG. 16B shows variant frequency, stratified by time. To emphasize TF loss progression, frequency of the TF form below the first row is blank. Each row corresponds to one time-point sampled for the three-year interval studied, weeks 0-160 (w000 through w160). FIG. 16C shows variant frequencies among swarm set of 54 selected Envs.

[0050] FIG. 17 shows the swarm selection algorithm. From a sequence alignment and list of selected sites, a greedy, deterministic approach identifies viable Envs and tabulates variants among selected sites. This table tracks which mutations remain to be included. Rare mutations, i.e. mutations detected fewer times than the minimum variant count over the entire sampling period, are disregarded. Selection among multiple sequences that carry a mutation is resolved by minimizing a series of distance criteria, first to minimize Hamming distance (number of mutations, gaps included) to the TF form among selected sites, then distance to the full-length TF sequence, and finally to minimize average distance to sequences in the current swarm set. The selected Env is included in the swarm set, counts in the table of needed variants are set to zero, and iteration continues. This produces a “swarm” of Envs, which represents variant diversity as it developed within the subject. Stacked boxes signify iteration.

[0051] FIGS. 18A-18B show the selected swarm set is distinct from randomly selected sets. FIG. 18A shows the number of distinct concatamers, mutations included, and clustering coefficients from dendrograms of concatamer distances differ for the selected swarm of 54 Envs (red) and the null distribution from 1,000 sets of 54 Envs, randomly selected without replacement from the non-redundant set of 260 viable full-length Envs, with the TF form always included. Values have jitter added for less overplotting. FIG. 18B shows the clustering coefficient quantifies sequence differences among as the average distance over which each sequence is merged into a cluster (horizontal grey bars in bottom row), compared for the selected and swarm set two extreme randomly sampled sets (min and max, circled points in the right-hand part of panel 18A.).

[0052] FIG. 19 shows env variants in phylogenetic context. A pixel plot is paired with the maximum-likelihood phylogeny, such that each row depicts one of 396 Envs sequenced by limiting-dilution PCR. The top row corresponds to the TF virus. In the pixel plot (left), sites that match the TF are blank and mutations are shaded indicate gain of negatively (light grey) or positively charged amino acids (medium grey), addition of an N-linked glycosylation motif (lighter grey), indels (black), or other mutations (grey). Stripes correspond roughly to TF loss. Env landmarks appear as vertical bands throughout the pixel plot (light grey), and dashed lines delineate the signal peptide and gp41. Tree branches and symbols are color-coded to indicate sample time-point, and the 54 selected Envs are marked by a black circle and horizontal bar.

[0053] FIG. 20 shows selected Envs that represent diverse binding phenotypes. Among the swarm of 54 Envs selected, 27 were synthesized as gp120s for ELISA binding assays (light grey text). Another four of the antigens tested contained selected sites that matched with those in selected Envs (w020.9; w100.B7; w160.C11; w160.D1). Binding data are shown as shades of grey to indicate log-transformed area under the curve (AUC) from dilution series, which summarized experimental results better than EC50s. Both assays tested Env constructs against monoclonal antibodies of the CH103 lineage, from mAb isolates (e.g., CH103) to the unmutated ancestor (UCA) via intermediate ancestors IA1-IA8 [15] (Liao H X, Lynch R, Zhou T, Gao F, Alam S M, Boyd S D, et al. Co-evolution of a broadly neutralizing HIV-1 antibody and founder virus. Nature. 2013; 496(7446):469-76. doi: 10.1038/nature12053. PubMed PMID: 23552890; PubMed Central PMCID: PMC3637846). Blank entries indicate no binding was detected. Selected Env sites correspond to concatamers in Table 3. An “X” appears for gp41 sites not in the gp120 antigens tested.

[0054] FIG. 21 shows selected Envs that represent diverse neutralization phenotypes. Among the swarm of 54 Envs, 26 were cloned into pseudovirus backbones for TZM-bl neutralization assays (red text). Another four of the Env-pseudotyped virus constructs tested contained selected sites that matched with those in selected Envs (w004.27; w004.10; w004.15; w020.27). Neutralization IC50s are depicted as shades of grey to indicate sensitivity of each virus to neutralization by each mAb in the CH103 lineage. Selected Env sites correspond to concatamers in Table 3.

[0055] FIGS. 22A-22D show structural mapping of selected and non-selected Env sites in CH505 sequences. (FIG. 22A) Sites selected by high TF loss are depicted by beads, in shades of grey to indicate when each site exceeded 10% TF loss, as listed in Table 2. For structural context, the immunologically relevant mutations and regions described in FIG. 15 are also shown. V1 sites missing from the structure are illustrated schematically (top left). (FIG. 22B) Sites that mutated only once among 398 CH505 Env sequences (0.25% TF loss over all time-points), and present in the structure, are identified by light grey beads. These sites were not selected, due to low TF loss. (FIG. 22C) Sites with two or more mutations among 398 CH505 Env sequences (at least 0.5% TF loss over all time-points), but less than 80% peak TF loss, are marked by light grey beads. (FIG. 22D) The symbols for each selected site in shades of grey.

[0056] FIG. 23 shows the number of sites varying with cutoff in chronically infected donor.

[0057] FIGS. 24A-24C show variant frequencies among selected sites in chronic infection. Frequencies from CH457, computed among (FIG. 24A) all sequences, pooled; (FIG. 24C) sequences stratified by time; and (FIG. 24B) 44 selected Envs. Medium grey indicates negative charge and “O” indicates a potentially gylcosylated asparagine (lighter grey). Indels appear as grey boxes.

[0058] FIG. 25 shows diversity in chronic infection. CH457 Env mutations (left), neutralization ID50 titers against autologous contemporaneous plasmas (center), and maximum-likelihood Env phylogeny (right). The 44 selected Envs are emphasized among all Envs sampled. The divergent clade appears above the “Time Sampled” legend. This representation follows FIG. 19, with neutralization titers added, one column per time-point. Neutralization responses were profiled for 84 Env-pseudotyped viruses, chosen before the swarm-selection algorithm existed, and tested against autologous sera from each time-point sampled.

[0059] FIG. 26 shows cumulative distribution of peak TF loss over 953 aligned Env sites. Peak TF loss is the greatest proportion of non-TF variants in any timepoint sampled. A third of sites are invariant. 36 sites with at least 80% peak TF loss (vertical line) were selected for further study.

[0060] FIG. 27 shows variant dynamics in 36 selected sites. Initially consisting of solely the TF form (dotted lines), forms emerge in the virus population, with varied dynamics across sites. Sites are numbered above each panel by alignment column and HXB2 position, e.g. “357/N279K” indicates alignment column 357, which corresponds to HXB2 279, and mutated from ancestral TF asparagine to lysine. Shades of grey indicate positive (medium grey) and negative (light grey) residue charges and “O” indicates a potentially gylcosylated asparagine (lighter grey). A dash (grey) indicates an insertion or deletion (indel) and the caret (̂) symbol in site numbers denotes an insertion at the C-terminal end of the given HXB2 position. For clarity, rare variants are not shown.

[0061] FIG. 28 shows variant dynamics in 36 selected sites, with confidence intervals. This is the same information presented in FIG. 27, with 95% confidence intervals on variant frequencies (shaded regions), estimated from the number of sequences sampled by the binomial distribution.

[0062] FIG. 29 shows the progression of TF loss in 36 CH505 Env sites. Symbol height indicates amino acid frequency per sample. To emphasize TF loss, frequencies of the TF form below the first row are blank. Each row corresponds to one timepoint sampled for the three-year interval studied, weeks 0-160 (w000 through w160). Colors correspond to FIG. 27, and indels appear as grey boxes. Dots after HXB2 numbers indicate C-terminal insertions. Site order follows FIG. 27.

[0063] FIG. 30 shows clone selection algorithm. Provided a sequence alignment and list of sites selected for representation in the swarm set, a greedy, deterministic approach identifies viable clones and tabulates variants among selected sites. This table of variant counts is used to track which mutations remain to be included in the swarm set. Variants that only appear once are ignored. Selection among multiple clones is resolved by a series of criteria, first to minimize distance (number of mutations, gaps included) to the TF form among selected sites, then the full-length clone, and finally to minimize average distance to clones in the swarm set. The selected clone is included in the swarm set, counts in the table of needed variants are set to zero, and iteration continues. This produces a swarm of clones that represents the variant diversity. Stacked boxes signify iteration.

[0064] FIG. 31 shows selected swarm clones are distinct from randomly selected swarms. Redundancy (number of duplicated concatamers) and clustering coefficient from concatamer Hamming distances are lower for the selected set of 57 clones (red) than 500 sets of 57 clones, randomly selected from the non-redundant set of 263 viable full-length clones. Redundancy values have jitter added for less overplotting.

[0065] FIGS. 32A-32C show swarm variant frequency from 57 concatamers over 36 selected sites. (FIG. 32A) TF amino acids. (FIG. 32B) Variant frequencies among 56 non-TF concatamers. Symbol height is proportional to amino acid frequency per sample. To emphasize TF loss, frequencies of the TF form are blank. (FIG. 32C) Combined frequencies of TF and non-TF variants. Indels appear as grey boxes. Colors correspond to FIG. 27. Dots after site numbers indicate C-terminal insertions.

[0066] FIG. 33 shows a table of CH505 Env sites with at least 80% peak TF loss. For the “Rank” column, sites were ranked by earliest to lose TF majority, then by increasing TF area. “ALN” refers to position in CH505 alignment. The “Week” column refers to timepoint at which this site first exceeds 50% TF loss. “TF area” refers to the cumultative TF loss, i.e. area under TF frequency as a function of time (dotted lines in FIG. 27). For entry “412/N332O” in the “Name column” (corresponding to Rank 3), asparagine is followed by a potential glycosylation motif Nx[ST], where x is not a proline. The caret symbol (̂) indicates an insertion at the C-terminal position of the HXB2 site.

[0067] FIG. 34 shows a table of concatamers from a swarm of 57 Env clones that represent selected sites. The sequences associated with the Genbank accession numbers KC and KM are incorporated by reference.

[0068] FIG. 35 shows the identification of sites by TF loss.

[0069] FIG. 36 shows the selection of clones with representative diversity.

[0070] FIG. 37 shows loss of ancestral transmitted-founder (TF) amino acids in Envs from CH505.

[0071] FIG. 38 shows variant frequency across 35 sites selected from CH505 Env gp160 stratified by time.

[0072] FIG. 39 shows the number of sites varying with TF loss cutoff for CH0505 gp160 (n=398 clones) and for CH0848 (n=1184 clones).

[0073] FIG. 40 shows the number of clones at minimum variant count. MVC=1 excludes singletons, i.e. mutations or indels only seen once.

[0074] FIG. 41 shows concatamers from a swarm of 54 env clones that represent selected sites.

[0075] FIG. 42 shows swarm variant frequency over 35 selected sites. The top row shows TF amino acids. The middle row shows variant frequencies among non-TF concatamers. Symbol height is proportional to amino acid frequency per sample. The bottom row shows combined frequencies of TF and non-TF variants. Indels appear as grey boxes.

[0076] FIG. 43 shows concatamers from a swarm of 90 env clones that represent selected sites.

[0077] FIG. 44 shows a plot of the sites above cutoff versus the non-UA cutoff

[0078] FIG. 45 shows variant frequency across 15 VH sites stratified by time.

[0079] FIG. 46 shows CH103 clonal family with time of appearance and VHDJH mutations. Maximum likelihood phylogram showing the CH103 lineage with the inferred intermediates (circles, I1-4, I7 and I8), and percentage mutated VH sites and timing indicated. Mutation frequency is 4-17%.

[0080] FIG. 47 shows CH103 clonal family binding affinity maturation. Binding affinities (Kd, nM) of antibodies to autologous subtype C CH505 (C.CH505; left box) and heterologous B.63521 (right box) were measured by surface plasmon reasonance.

[0081] FIG. 48 shows the development of neutralization breadth in the CH103 clonal lineage. The phylogenetic CH103 clonal lineage tree showing the IC50 (mg ml21) of neutralization of the autologous transmitted/founder (C.CH505), heterologous tier clades A (A.Q842) and B (B.BG1168) viruses as indicated. There is increasing neutralization potency and breadth (TZM-bl assay).

[0082] FIG. 49 shows the steps of a B-cell-lineage—based approach to vaccine design. Step 1 is to isolate VH and VL chain members from the peripheral blood or tissues of patients containing BnAbs and to express these native Ig chain pairs as whole antibodies. Step 2 is to infer intermediate ancestor antibodies (IAs, labeled 1, 2 and 3) and the unmutated ancestor antibody (UA). Step 3 requires producing the unmutated and intermediate ancestors as recombinant mAbs and using structure-based alterations in the antigen (changes in Env constructs predicted to enhance binding to the unmutated or intermediate ancestors) or deriving altered antigens using a suitably designed selection strategy. Vaccine administration might prime with the antigen that binds the unmutated ancestor most tightly, and this is then followed by sequential boosts with antigens optimized for binding to each intermediate ancestor. Shown here is an actual clonal lineage of the V1/V2-directed BnAbs CH01-CH04. Targeting the unmutated ancestor with an immunogen that has enhanced binding may induce higher antibody responses. If high-affinity ligands for unmutated ancestors cannot be found, then high-affinity ligands targeting the intermediate ancestors may be equally useful for triggering a response.

[0083] FIGS. 50A-50B show a comparison of the pace of viral sequence evolution in CH505 (indicated here by the 9-digit anonymous study-participant identifier 703010505) in regions relevant to the CH103 epitope with other subjects. The regions of interest include the CH103 contacts defined by the structure in this paper, as well as VRC01 contacts and CD4bs contacts, and the V1 and V5 loops immediately adjacent to these contacts. (FIG. 50A) The distribution of sequence distances expressed as the percentage of amino acids that are different between two sequences, resulting from a pair-wise comparison of all sequences sampled in a given time point. Because these are all homogeneous (single-founder) infection cases, very few mutations appear in the CH103 relevant regions or other sites in the virus during acute infection (left hand panels). By 24 weeks after enrollment (week 30 from infection in (A) 703010505, labeled month 6 here as it is approximate), extensive mutations have begun to accrue, focused in CH103 relevant regions (top middle panel), but not in other regions of Env (bottom middle panel). Subject 703010505 has the highest ranked diversity among 15 subjects (B-Q) sampled in this time frame (p=0.067), indicating a focused selective pressure began unusually early in this subject. By 1 year (month 12 indicates samples taken between 10-14 months from enrollment, due to variation in timing of patient visits), this region has begun to evolve in many individuals, possibly due to autologous NAb responses active later in infection. (FIG. 50B) Phylogenetic trees based on concatenated CH103 relevant regions (HXB2 sites 124-127, 131, 132, 279-283, 364-371, 425-432, 455-465, 471-477) were created with PhyML3.0, using HIVw, a within-subject HIV protein substitution model, which was selected to be the optimum model for these sequences using ProtTest. Indels were treated as an additional character state, rather than as missing information. In this view, the extensive evolution away from the T/F virus by month 6, shown in gold, is particularly striking. Distances between sequences sampled in 703010505 (A) at month 6 and the T/F ancestral state were significantly greater than the sequences in the next most variable individual (L) designated by the 9-digit identifier 704010042 (Wilcoxon rank sum, p=0.0003: CH505, median=0.064, range=0.019-0.13, N=25, and 704010042, median=0.0271, range=0.009-0.056, N=26).

### DETAILED DESCRIPTION OF THE INVENTION

[0084] The development of a safe, highly efficacious prophylactic HIV-1 vaccine is of paramount importance for the control and prevention of HIV-1 infection. A major goal of HIV-1 vaccine development is the induction of broadly neutralizing antibodies (bnAbs) (Immunol. Rev. 254: 225-244, 2013). BnAbs are protective in rhesus macaques against SHIV challenge, but as yet, are not induced by current vaccines.

[0085] For the past 25 years, the HIV vaccine development field has used single or prime boost heterologous Envs as immunogens, but to date has not found a regimen to induce high levels of bnAbs.

[0086] Recently, a new paradigm for design of strategies for induction of broadly neutralizing antibodies was introduced, that of B cell lineage immunogen design (Nature Biotech. 30: 423, 2012) in which the induction of bnAb lineages is recreated. It was recently demonstrated the power of mapping the co-evolution of bnAbs and founder virus for elucidating the Env evolution pathways that lead to bnAb induction (Nature 496: 469, 2013). From this type of work has come the hypothesis that bnAb induction will require a selection of antigens to recreate the “swarms” of sequentially evolved viruses that occur in the setting of bnAb generation in vivo in HIV infection (Nature 496: 469, 2013).

[0087] A critical question is why the CH505 immunogens are better than other immunogens. This rationale comes from three recent observations. First, a series of immunizations of single putatively “optimized” or “native” trimers when used as an immunogen have not induced bnAbs as single immunogens. Second, in all the chronically infected individuals who do develop bnAbs, they develop them in plasma after ˜2 years. When these individuals have been studied at the time soon after transmission, they do not make bnAbs immediately. Third, now that individual's virus and bnAb co-evolution has been mapped from the time of transmission to the development of bnAbs, the identification of the specific Envs that lead to bnAb development have been identified-thus taking the guess work out of envelope choice.

[0088] Two other considerations are important. The first is that for the CH103 bnAb CD4 binding site lineage, the VH4-59 and Vλ3-1 genes are common as are the VDJ, VJ recombinations of the lineage (Liao, Nature 496: 469, 2013). In addition, the bnAb sites are so unusual, the same VH and VL usage has been found to be recurring in multiple individuals. Thus, it can be expected that the CH505 Envs induce CD4 binding site antibodies in many different individuals.

[0089] Finally, regarding the choice of gp120 vs. gp160, for the genetic immunization, gp160 would not normally even be considered for use. However, in acute infection, gp41 non-neutralizing antibodies are dominant and overwhelm gp120 responses (Tomaras, G et al. J. Virol. 82: 12449, 2008; Liao, H X et al. JEM 208: 2237, 2011). Recently, it has been found that the HVTN 505 DNA prime, rAd5 vaccine trial that utilized gp140 as an immunogen, also had the dominant response of non-neutralizing gp41 antibodies. Thus, the early-on use of gp160 vs gp120 for gp41 dominance will be explored.

[0090] In certain aspects the invention provides a strategy for induction of bnAbs is to select and develop immunogens and combinations designed to recreate the antigenic evolution of Envs that occur when bnAbs do develop in the context of infection.

[0091] That broadly neutralizing antibodies (bnAbs) occur in nearly all sera from chronically infected HIV-1 subjects suggests anyone can develop some bnAb response if exposed to immunogens via vaccination. Working back from mature bnAbs through intermediates enabled understanding their development from the unmutated ancestor, and showed that antigenic diversity preceded the development of population breadth. See Liao et al. (2013) Nature 496, 469-476. In this study, an individual “CH505” was followed from HIV-1 transmission to development of broadly neutralizing antibodies. This individual developed antibodies targeted to CD4 binding site on gp120. In this individual the virus was sequenced over time, and broadly neutralizing antibody clonal lineage (“CH103”) was isolated by antigen-specific B cell sorts, memory B cell culture, and amplified by VH/VL next generation pyrosequencing. The CH103 lineage began by binding the T/F virus, autologous neutralization evolved through somatic mutation and affinity maturation, escape from neutralization drove rapid (clearly by 20 weeks) accumulation of variation in the epitope, antibody breadth followed this viral diversification.

[0092] Further analysis of envelopes and antibodies from the CH505 individual indicated that a non-CH103 Lineage (DH235) participates in driving CH103-BnAb induction. See Gao et al. (2014) Cell 158:481-491. For example V1 loop, V5 loop and CD4 binding site loop mutations escape from CH103 and are driven by CH103 lineage. Loop D mutations enhanced neutralization by CH103 lineage and are driven by another lineage. Transmitted/founder Env, or another early envelope for example W004.26, triggers naïve B cell with CH103 Unmutated Common Ancestor (UCA) which develop in to intermediate antibodies. Transmitted/founder Env, or another early envelope for example W004.26, also triggers non-CH103 autologous neutralizing Abs that drive loop D mutations in Env that have enhanced binding to intermediate and mature CH103 antibodies and drive remainder of the lineage. In certain embodiments, the inventive composition and methods also comprise loop D mutant envelopes (e.g. but not limited to M10, M11, M19, M20, M21, M5, M6, M7, M8, M9) as immunogens. In certain embodiments, the D-loop mutants are included in an inventive composition used to induce an immune response in a subject. In certain embodiments, the D-loop mutants are included in a composition used as a prime.

[0093] The invention provides various methods to choose a subset of viral variants, including but not limited to envelopes, to investigate the role of antigenic diversity in serial samples. In other aspects, the invention provides compositions comprising viral variants, for example but not limited to envelopes, selected based on various criteria as described herein to be used as immunogens. In some embodiments, the immunogens are selected based on the envelope binding to the UCA, and/or intermediate antibodies. In some embodiments the immunogens are selected based on their chronological appearance and/or sequence diversity during infection.

[0094] In other aspects, the invention provides immunization strategies using the selections of immunogens to induce cross-reactive neutralizing antibodies. In certain aspects, the immunization strategies as described herein are referred to as “swarm” immunizations to reflect that multiple envelopes are used to induce immune responses. The multiple envelopes in a swarm could be combined in various immunization protocols of priming and boosting.

[0095] In certain embodiments the invention provides that sites losing the ancestral, transmitted-founder (T/F) state are most likely under positive selection. From acute, homogenous infections with 3-5 years of follow-up, identified herein are sites of interest among plasma single genome analysis (SGA) Envs by comparing the proportion of sequences per time-point in the T/F state with a threshold, typically 5%. Sites with T/F frequencies below threshold are putative escapes. Clones with representative escape mutations were selected. Where more information was available, such as tree-corrected neutralization signatures and antibody contacts from co-crystal structure, additional sites of interest were considered.

[0096] Co-evolution of a broadly neutralizing HIV-1 antibody (CH103) and founder virus was previously reported in African donor (CH505). See Liao et al. (2013) Nature 496, 469-476. In CH505, which had an early antibody that bound autologous T/F virus, 398 envs from 14 time-points over three years (median per sample: 25, range: 18-53) were studied. 36 sites with T/F frequencies under 20% were found in any sample. Neutralization and structure data identified 28 and 22 interesting sites, respectively. Together, six gp41 and 53 gp120 sites were identified, plus six V1 or V5 insertions not in HXB2.

[0097] The invention provides an approach to select reagents for neutralization assays and subsequently investigate affinity maturation, autologous neutralization, and the transition to heterologous neutralization and breadth. Given the sustained coevolution of immunity and escape this antigen selection based on antibody and antigen coevolution has specific implications for selection of immunogens for vaccine design.

[0098] In one embodiment, 54 envelopes were selected that represent the selected sites. In another embodiment, 27 envelopes were selected that represent the selected sites. These sets of envelopes represent antigenic diversity by deliberate inclusion of polymorphisms that result from immune selection by neutralizing antibodies, and had a lower clustering coefficient and greater diversity in selected sites than sets sampled randomly. These selections represent various levels of antigenic diversity in the HIV-1 envelope. In some embodiments the selections are based on the genetic diversity of longitudinally sampled SGA envelopes. In some embodiments the selections are based on antigenic and or neutralization diversity. In some embodiments and are based on the genetic diversity of longitudinally sampled SGA envelopes, and correlated with other factors such as antigenic/neutralization diversity, and antibody coevolution.

[0099] Sequences/Clones

[0100] Described herein are nucleic and amino acids sequences of HIV-1 envelopes. In certain embodiments, the described HIV-1 envelope sequences are gp160s. In certain embodiments, the described HIV-1 envelope sequences are gp120s. Other sequences, for example but not limited to gp145s, gp140s, both cleaved and uncleaved, gp150s, gp41s, which are readily derived from the nucleic acid and amino acid gp160 sequences. In certain embodiments the nucleic acid sequences are codon optimized for optimal expression in a host cell, for example a mammalian cell, a rBCG cell or any other suitable expression system. Described herein are nucleic and amino acids sequences of HIV-1 envelopes. In certain embodiments, the described HIV-1 envelope sequences are gp160s. In certain embodiments, the described HIV-1 envelope sequences are gp120s. Other sequences, for example but not limited to gp140s, both cleaved and uncleaved, gp140 Envs with the deletion of the cleavage (C) site, fusion (F) and immunodominant (I) region in gp41—named as gp140ΔCFI, gp140 Envs with the deletion of only the cleavage (C) site and fusion (F) domain—named as gp140ΔCF, gp140 Envs with the deletion of only the cleavage (C)—named gp140ΔC (See e.g. Liao et al. Virology 2006, 353, 268-282), gp145s, gp150s, gp41s, which are readily derived from the nucleic acid and amino acid gp160 sequences. In certain embodiments the nucleic acid sequences are codon optimized for optimal expression in a host cell, for example a mammalian cell, a rBCG cell or any other suitable expression system.

[0101] In certain embodiments, the envelope design in accordance with the present invention involves deletion of residues (e.g., 5-11, 5, 6, 7, 8, 9, 10, or 11 amino acids) at the N-terminus. For delta N-terminal design, amino acid residues ranging from 4 residues or even fewer to 14 residues or even more are deleted. These residues are between the maturation (signal peptide, usually ending with CX, X can be any amino acid) and “VPVXXXX . . . ”. In case of CH505 T/F Env as an example, 8 amino acids (italicized and underlined in the below sequence) were deleted: MRVMGIQRNYPQWWIWSMLGFWMLMICNGMWVTVYYGVPVWKEAKTTLFCASDA KAYEKEVHNVWATHACVPTDPNPQE . . . (rest of envelope sequence is indicated as “ . . . ”). In other embodiments, the delta N-design described for CH505 T/F envelope can be used to make delta N-designs of other CH505 envelopes. In certain embodiments, the invention relates generally to an immunogen, gp160, gp120 or gp140, without an N-terminal Herpes Simplex gD tag substituted for amino acids of the N-terminus of gp120, with an HIV leader sequence (or other leader sequence), and without the original about 4 to about 25, for example 4, 5, 6, 7, 8, 9, 10, 11, 12, 13, 14, 15, 16, 17, 18, 19, 20, 21, 22, 23, 24, 25 amino acids of the N-terminus of the envelope (e.g. gp120). See WO2013/006688, e.g. at pages 10-12, the contents of which publication is hereby incorporated by reference in its entirety.

[0102] The general strategy of deletion of N-terminal amino acids of envelopes results in proteins, for example gp120s, expressed in mammalian cells that are primarily monomeric, as opposed to dimeric, and, therefore, solves the production and scalability problem of commercial gp120 Env vaccine production. In other embodiments, the amino acid deletions at the N-terminus result in increased immunogenicity of the envelopes.

[0103] In certain embodiments, the invention provides envelope sequences, amino acid sequences and the corresponding nucleic acids, and in which the V3 loop is substituted with the following V3 loop sequence TRPNNNTRKSIRIGPGQTFY ATGDIIGNIRQAH (SEQ ID NO: 150). This substitution of the V3 loop reduced product cleavage and improves protein yield during recombinant protein production in CHO cells.

[0104] In certain embodiments, the CH505 envelopes will have added certain amino acids to enhance binding of various broad neutralizing antibodies. Such modifications could include but not limited to, mutations at W680G or modification of glycan sites for enhanced neutralization.

[0105] In certain aspects, the invention provides composition and methods which use a selection of sequential CH505 Envs, as gp120s, gp 140s cleaved and uncleaved, gp145s, gp150s and gp160s, as proteins, DNAs, RNAs, or any combination thereof, administered as primes and boosts to elicit immune response. Sequential CH505 Envs as proteins would be co-administered with nucleic acid vectors containing Envs to amplify antibody induction. In certain embodiments, the compositions and methods include any immunogenic HIV-1 sequences to give the best coverage for T cell help and cytotoxic T cell induction. In certain embodiments, the compositions and methods include mosaic and/or consensus HIV-1 genes to give the best coverage for T cell help and cytotoxic T cell induction. In certain embodiments, the compositions and methods include mosaic group M and/or consensus genes to give the best coverage for T cell help and cytotoxic T cell induction. In some embodiments, the mosaic genes are any suitable gene from the HIV-1 genome. In some embodiments, the mosaic genes are Env genes, Gag genes, Pol genes, Nef genes, or any combination thereof. See e.g. U.S. Pat. No. 7,951,377. In some embodiments the mosaic genes are bivalent mosaics. In some embodiments the mosaic genes are trivalent. In some embodiments, the mosaic genes are administered in a suitable vector with each immunization with Env gene inserts in a suitable vector and/or as a protein. In some embodiments, the mosaic genes, for example as bivalent mosaic Gag group M consensus genes, are administered in a suitable vector, for example but not limited to HSV2, would be administered with each immunization with Env gene inserts in a suitable vector, for example but not limited to HSV-2.

[0106] In certain aspects the invention provides compositions and methods of Env genetic immunization either alone or with Env proteins to recreate the swarms of evolved viruses that have led to bnAb induction. Nucleotide-based vaccines offer a flexible vector format to immunize against virtually any protein antigen. Currently, two types of genetic vaccination are available for testing—DNAs and mRNAs.

[0107] In certain aspects the invention contemplates using immunogenic compositions wherein immunogens are delivered as DNA. See Graham B S, Enama M E, Nason M C, Gordon I J, Peel S A, et al. (2013) DNA Vaccine Delivered by a Needle-Free Injection Device Improves Potency of Priming for Antibody and CD8+ T-Cell Responses after rAd5 Boost in a Randomized Clinical Trial. PLoS ONE 8(4): e59340, page 9. Various technologies for delivery of nucleic acids, as DNA and/or RNA, so as to elicit immune response, both T-cell and humoral responses, are known in the art and are under developments. In certain embodiments, DNA can be delivered as naked DNA. In certain embodiments, DNA is formulated for delivery by a gene gun. In certain embodiments, DNA is administered by electroporation, or by a needle-free injection technologies, for example but not limited to Biojector® device. In certain embodiments, the DNA is inserted in vectors. The DNA is delivered using a suitable vector for expression in mammalian cells. In certain embodiments the nucleic acids encoding the envelopes are optimized for expression. In certain embodiments DNA is optimized, e.g. codon optimized, for expression. In certain embodiments the nucleic acids are optimized for expression in vectors and/or in mammalian cells. In non-limiting embodiments these are bacterially derived vectors, adenovirus based vectors, rAdenovirus (e.g. Barouch D H, et al. Nature Med. 16: 319-23, 2010), recombinant mycobacteria (e.g. rBCG or M smegmatis) (Yu, J S et al. Clinical Vaccine Immunol. 14: 886-093, 2007; ibid 13: 1204-11, 2006), and recombinant vaccinia type of vectors (Santra S. Nature Med. 16: 324-8, 2010), for example but not limited to ALVAC, replicating (Kibler K V et al., PLoS One 6: e25674, 2011 Nov. 9.) and non-replicating (Perreau M et al. J. virology 85: 9854-62, 2011) NYVAC, modified vaccinia Ankara (MVA)), adeno-associated virus, Venezuelan equine encephalitis (VEE) replicons, Herpes Simplex Virus vectors, and other suitable vectors.

[0108] In certain aspects the invention contemplates using immunogenic compositions wherein immunogens are delivered as DNA or RNA in suitable formulations. Various technologies which contemplate using DNA or RNA, or may use complexes of nucleic acid molecules and other entities to be used in immunization. In certain embodiments, DNA or RNA is administered as nanoparticles consisting of low dose antigen-encoding DNA formulated with a block copolymer (amphiphilic block copolymer 704). See Cany et al., Journal of Hepatology 2011 vol. 54 j 115-121; Arnaoty et al., Chapter 17 in Yves Bigot (ed.), Mobile Genetic Elements: Protocols and Genomic Applications, Methods in Molecular Biology, vol. 859, pp 293-305 (2012); Arnaoty et al. (2013) Mol Genet Genomics. 2013 August; 288(7-8):347-63. Nanocarrier technologies called Nanotaxi® for immunogenic macromolecules (DNA, RNA, Protein) delivery are under development. See for example technologies developed by incellart.

[0109] In certain aspects the invention contemplates using immunogenic compositions wherein immunogens are delivered as recombinant proteins. Various methods for production and purification of recombinant proteins suitable for use in immunization are known in the art. In certain embodiments recombinant proteins are produced in CHO cells.

[0110] The immunogenic envelopes can also be administered as a protein boost in combination with a variety of nucleic acid envelope primes (e.g., HIV -1 Envs delivered as DNA expressed in viral or bacterial vectors).

[0111] Dosing of proteins and nucleic acids can be readily determined by a skilled artisan. A single dose of nucleic acid can range from a few nanograms (ng) to a few micrograms GO or milligram of a single immunogenic nucleic acid. Recombinant protein dose can range from a few μg micrograms to a few hundred micrograms, or milligrams of a single immunogenic polypeptide.

[0112] Administration: The compositions can be formulated with appropriate carriers using known techniques to yield compositions suitable for various routes of administration. In certain embodiments the compositions are delivered via intramascular (IM), via subcutaneous, via intravenous, via nasal, via mucosal routes, or any other suitable route of immunization.

[0113] The compositions can be formulated with appropriate carriers and adjuvants using techniques to yield compositions suitable for immunization. The compositions can include an adjuvant, such as, for example but not limited to, alum, poly IC, MF-59 or other squalene-based adjuvant, ASOIB, or other liposomal based adjuvant suitable for protein or nucleic acid immunization. In certain embodiments, the adjuvant is GSK AS01E adjuvant containing MPL and QS21. This adjuvant has been shown by GSK to be as potent as the similar adjuvant AS01B but to be less reactogenic using HBsAg as vaccine antigen [Leroux-Roels et al., IABS Conference, April 2013, 9]. In certain embodiments, TLR agonists are used as adjuvants. In other embodiment, adjuvants which break immune tolerance are included in the immunogenic compositions.

[0114] In certain embodiments, the compositions and methods comprise any suitable agent or immune modulation which could modulate mechanisms of host immune tolerance and release of the induced antibodies. In non-limiting embodiments modulation includes PD-1 blockade; T regulatory cell depletion; CD40L hyperstimulation; soluble antigen administration, wherein the soluble antigen is designed such that the soluble agent eliminates B cells targeting dominant epitopes, or a combination thereof. In certain embodiments, an immunomodulatory agent is administered in at time and in an amount sufficient for transient modulation of the subject's immune response so as to induce an immune response which comprises broad neutralizing antibodies against HIV-1 envelope. Non-limiting examples of such agents is any one of the agents described herein: e.g. chloroquine (CQ), PTP1B Inhibitor—CAS 765317-72-4—Calbiochem or MSI 1436 clodronate or any other bisphosphonate; a Foxol inhibitor, e.g. 344355|Foxo1 Inhibitor, AS1842856—Calbiochem; Gleevac, anti-CD25 antibody, anti-CCR4 Ab, an agent which binds to a B cell receptor for a dominant HIV-1 envelope epitope, or any combination thereof. In certain embodiments, the methods comprise administering a second immunomodulatory agent, wherein the second and first immunomodulatory agents are different.

[0115] There are various host mechanisms that control bNAbs. For example highly somatically mutated antibodies become autoreactive and/or less fit (Immunity 8: 751, 1998; PloS Comp. Biol. 6 e1000800, 2010; J. Thoret. Biol. 164:37, 1993); Polyreactive/autoreactive naïve B cell receptors (unmutated common ancestors of clonal lineages) can lead to deletion of Ab precursors (Nature 373: 252, 1995; PNAS 107: 181, 2010; J. Immunol. 187: 3785, 2011); Abs with long HCDR3 can be limited by tolerance deletion (JI 162: 6060, 1999; JCI 108: 879, 2001). BnAb knock-in mouse models are providing insights into the various mechanisms of tolerance control of MPER BnAb induction (deletion, anergy, receptor editing). Other variations of tolerance control likely will be operative in limiting BnAbs with long HCDR3s, high levels of somatic hypermutations.

[0116] The invention is described in the following non-limiting examples.

### EXAMPLES

### Example 1

[0117] HIV-1 sequences, including envelopes, and antibodies from HIV-1 infected individual CH505 were isolated as described in Liao et al. (2013) Nature 496, 469-476 including supplementary materials; See also Gao et al. (2014) Cell 158:481-491.

[0118] Recombinant HIV-1 Proteins

[0119] HIV-1 Env genes for subtype B, 63521, subtype C, 1086, and subtype CRF_01, 427299, as well as subtype C, CH505 autologous transmitted/founder Env were obtained from acutely infected HIV-1 subjects by single genome amplification, codon-optimized by using the codon usage of highly expressed human housekeeping genes, de novo synthesized (GeneScript) as gp140 or gp120 (AE.427299) and cloned into a mammalian expression plasmid pcDNA3.1/hygromycin (Invitrogen). Recombinant Env glycoproteins were produced in 293F cells cultured in serum-free medium and transfected with the HIV-1 gp140- or gp120-expressing pcDNA3.1 plasmids, purified from the supernatants of transfected 293F cells by using Galanthus nivalis lectin-agarose (Vector Labs) column chromatography, and stored at −80° C. Select Env proteins made as CH505 transmitted/founder Env were further purified by superose 6 column chromatography to trimeric forms, and used in binding assays that showed similar results as with the lectin-purified oligomers.

[0120] ELISA

[0121] Binding of patient plasma antibodies and CH103, and DH235(CH235), See Gao et al. (2014) Cell 158:481-491, clonal lineage antibodies to autologous and heterologous HIV-1 Env proteins was measured by ELISA as described previously. Plasma samples in serial threefold dilutions starting at 1:30 to 1:521,4470 or purified monoclonal antibodies in serial threefold dilutions starting at 100 μg ml-1 to 0.000 μg ml-1 diluted in PBS were assayed for binding to autologous and heterologous HIV-1 Env proteins. Binding of biotin-labelled CH103 at the subsaturating concentration was assayed for cross-competition by unlabeled HIV-1 antibodies and soluble CD4-Ig in serial fourfold dilutions starting at 10 μg ml-1. The half-maximal effective concentration (EC50) of plasma samples and monoclonal antibodies to HIV-1 Env proteins were determined and expressed as either the reciprocal dilution of the plasma samples or concentration of monoclonal antibodies.

[0122] Surface Plasmon Resonance Affinity and Kinetics Measurements

[0123] Binding Kd and rate constant (association rate (Ka)) measurements of monoclonal antibodies and all candidate UCAs to the autologous Env C. CH05 gp140 and/or the heterologous Env B.63521 gp120 are carried out on BIAcore 3000 instruments as described previously. Anti-human IgG Fc antibody (Sigma Chemicals) is immobilized on a CM5 sensor chip to about 15,000 response units and each antibody is captured to about 50-200 response units on three individual flow cells for replicate analysis, in addition to having one flow cell captured with the control Synagis (anti-RSV) monoclonal antibody on the same sensor chip. Double referencing for each monoclonal antibody—HIV-1 Env binding interactions is used to subtract nonspecific binding and signal drift of the Env proteins to the control surface and blank buffer flow, respectively. Antibody capture level on the sensor surface is optimized for each monoclonal antibody to minimize rebinding and any associated avidity effects. C.CH505 Env gp140 protein is injected at concentrations ranging from 2 to 25 μg ml-1, and B.63521 gp120 was injected at 50-400 μg ml-1 for UCAs and early intermediates IA8 and IA4, 10-100 μg ml-1 for intermediate IA3, and 1-25 μg ml-1 for the distal and mature monoclonal antibodies. All curve-fitting analyses are performed using global fit of to the 1:1 Langmuir model and are representative of at least three measurements. All data analysis was performed using the BIAevaluation 4.1 analysis software (GE Healthcare).

[0124] Neutralization Assays

[0125] Neutralizing antibody assays in TZM-bl cells are performed as described previously. Neutralizing activity of plasma samples in eight serial threefold dilutions starting at 1:20 dilution and for recombinant monoclonal antibodies in eight serial threefold dilutions starting at 50 μg ml-1 are tested against autologous and herologous HIV-1 Env-pseudotyped viruses in TZM-bl-based neutralization assays using the methods known in the art. Neutralization breadth of CH103 is determined using a panel of 196 of geographically and genetically diverse Env-pseudoviruses representing the major circulated genetic subtypes and circulating recombinant forms. HIV-1 subtype robustness is derived from the analysis of HIV-1 clades over time. The data are calculated as a reduction in luminescence units compared with control wells, and reported as IC50 in either reciprocal dilution for plasma samples or in micrograms per microlitre for monoclonal antibodies.

[0126] The GenBank accession numbers for 292 CH505 Env proteins are KC247375-KC247667, and accessions for 459 V_{H}DJ_{H} and 174 V_{L}J_{L} sequences of antibody members in the CH103 clonal lineage are KC575845-KC576303 and KC576304-KC576477, respectively.

### Example 2

[0127] Binding of sequential envelopes to CH103 CD4 binding site bnAb lineage members. The binding assay was an ELISA with the envelope protein bound to the well surface of a 96 well plate, and the antibody in questions incubated with the envelope bound to the plate. After washing, an enzyme-labeled anti-human IgG antibody was added and after incubation, washed away. The intensity of binding was determined by the intensity of enzyme-activated color in the well.

TABLE 1
ELISA binding, log-transformed area under the curve (AUC) values for a realization that
embodies 54 Env-derived gp120 antigens, assayed against members of the CH103 bnAb lineage
from universal ancestor (UCA), through intermediate ancestors (IA8-IA1) to the mature
bnAb. Values of 0 indicate no binding. Only 27 of the 54 antigens in this particular
embodiment were assayed for binding. The TF antigen was derived from Env w004.3.

| Antigen | UCA | IA8 | IA7 | IA6 | IA4 | IA3 | CH105 | IA2 | CH104 | IA1 | CH106 | CH103 |
|---|---|---|---|---|---|---|---|---|---|---|---|---|
| TF | 3.5 | 5.5 | 9.2 | 9.1 | 10.1 | 11 | 11.2 | 10.8 | 10.4 | 10.4 | 11.3 | 12.6 |
| w020.15 | 1.6 | 4.2 | 8.2 | 7.8 | 9.1 | 10.2 | 10.8 | 10.5 | 10.5 | 9.9 | 10.5 | 11.8 |
| w030.13 | 0.3 | 2 | 4.7 | 6.5 | 7.4 | 9 | 10.5 | 11.4 | 11.3 | 10.5 | 11.9 | 12.9 |
| w020.25 | 0.8 | 2.4 | 6.4 | 6 | 7.3 | 8.6 | 8.2 | 9 | 8.3 | 8.6 | 9.4 | 10.3 |
| w004.54 | 0 | 0.5 | 2.3 | 2.9 | 2.8 | 5.1 | 8.3 | 6.8 | 8.1 | 6.2 | 8.1 | 9.2 |
| w020.11 | 0 | 0.9 | 0.1 | 0.8 | 0.8 | 0.8 | 3.6 | 2.6 | 2.2 | 1.8 | 5.4 | 9.6 |
| w078.15 | 0 | 0 | 0.7 | 1 | 1.3 | 3 | 10.1 | 11.5 | 10.8 | 10.9 | 11 | 10.7 |
| w053.22 | 0 | 0 | 0 | 0 | 0.2 | 1.1 | 9 | 9.3 | 9.9 | 8.8 | 9.8 | 11.6 |
| w136.B23 | 0 | 0 | 0 | 0 | 0 | 0 | 13.7 | 14.3 | 14.2 | 14.4 | 13.3 | 11.8 |
| w053.31 | 0 | 0 | 0 | 0 | 0 | 0 | 13.5 | 13.3 | 13.7 | 13.4 | 13.4 | 13.6 |
| w136.B2 | 0 | 0 | 0 | 0 | 0 | 0 | 12.4 | 13.1 | 13.2 | 13.2 | 12.7 | 10.8 |
| w100.A13 | 0 | 0 | 0 | 0 | 0 | 0 | 11.4 | 12.5 | 12.9 | 12.6 | 12 | 12.9 |
| w100.B4 | 0 | 0 | 0 | 0 | 0 | 0 | 11.9 | 13.4 | 13.1 | 13.7 | 12.6 | 9.7 |
| w160.T4 | 0 | 0 | 0 | 0 | 0 | 0 | 12.2 | 13.4 | 12.8 | 13.6 | 12.3 | 9 |
| w030.21 | 0 | 0 | 0 | 0 | 0 | 0 | 10.6 | 11.5 | 11.3 | 11.8 | 10.9 | 12.2 |
| w053.15 | 0 | 0 | 0 | 0 | 0 | 0 | 9.4 | 9.5 | 10.4 | 9.2 | 10.1 | 11.2 |
| w078.17 | 0 | 0 | 0 | 0 | 0 | 0 | 9.5 | 9.9 | 10 | 9 | 8.7 | 11.3 |
| w136.B10 | 0 | 0 | 0 | 0 | 0 | 0 | 8.5 | 9.7 | 8.9 | 9.2 | 9 | 11.5 |
| w053.29 | 0 | 0 | 0 | 0 | 0 | 0 | 8.5 | 9.2 | 9.8 | 8.8 | 9.7 | 10.2 |
| w078.33 | 0 | 0 | 0 | 0 | 0 | 0 | 8.9 | 9 | 9 | 8.2 | 9.5 | 11.1 |
| w136.B5 | 0 | 0 | 0 | 0 | 0 | 0 | 10.5 | 9.9 | 10.6 | 9.5 | 10.9 | 4.3 |
| w030.36 | 0 | 0 | 0 | 0 | 0 | 0 | 7.5 | 7.3 | 7.8 | 6.7 | 8.5 | 9.1 |
| w030.17 | 0 | 0 | 0 | 0 | 0 | 0 | 6.7 | 7 | 7 | 5.8 | 8.2 | 9.9 |
| w078.9 | 0 | 0 | 0 | 0 | 0 | 0 | 6.6 | 7.2 | 6.9 | 6.3 | 8.3 | 8.9 |
| w030.20 | 0 | 0 | 0 | 0 | 0 | 0 | 7.1 | 6.3 | 7.5 | 5.7 | 7.3 | 9.5 |
| w100.B2 | 0 | 0 | 0 | 0 | 0 | 0 | 7.5 | 7.5 | 6.1 | 7.3 | 7.8 | 3.2 |
| w078.6 | 0 | 0 | 0 | 0 | 0 | 0 | 3.8 | 4.6 | 4.5 | 3 | 6.7 | 9.9 |

### Example 3

[0128] Combinations of antigens derived from CH505 envelope sequences for swarm immunizations

[0129] Provided herein are non-limiting examples of combinations of antigens derived from CH505 envelope sequences for a swarm immunization. Without limitations, these selected combinations comprise envelopes which provide representation of the sequence and antigenic diversity of the HIV-1 envelope variants which lead to the induction and maturation of the CH103 and CH235 antibody lineages.

[0130] The selection includes priming with a virus which binds to the UCA, for example a T/F virus or another early (e.g. but not limited to week 004.3, or 004.26) virus envelope. In certain embodiments the prime could include D-loop variants. In certain embodiments the boost could include D-loop variants. In certain embodiments, these D-loop variants are envelope escape mutants not recognized by the UCA. Non-limiting examples of such D-loop variants are envelopes designated as M10, M11, M19, M20, M21, M5, M6, M7, M8, M9, M14 (TF_M14), M24 (TF_24), M15, M16, M17, M18, M22, M23, M24, M25, M26. See Gao et al. (2014) Cell 158:481-491.

[0131] Non-limiting embodiments of envelopes selected for swarm vaccination are shown as the selections described below. A skilled artisan would appreciate that a vaccination protocol can include a sequential immunization starting with the “prime” envelope(s) and followed by sequential boosts, which include individual envelopes or combination of envelopes. In another vaccination protocol, the sequential immunization starts with the “prime” envelope(s) and is followed with boosts of cumulative prime and/or boost envelopes. In certain embodiments, the sequential immunization starts with the “prime” envelope(s) and is followed by boost(s) with all or various combinations of the envelopes in the selection. In certain embodiments, the prime does not include T/F sequence (W000.TF). In certain embodiments, the prime includes w004.03 envelope. In certain embodiments, the prime includes w004.26 envelope. In certain embodiment the prime includes M11. In certain embodiments the prime includes M5. In certain embodiments, the immunization methods do not include immunization with HIV-1 envelope T/F. In certain embodiments, the immunization methods do not include a schedule of four valent immunization with HIV-1 envelopes T/F, w053.16, w078.33, and w100.B6.

[0132] In certain embodiments, there is some variance in the immunization regimen; in some embodiments, the selection of HIV-1 envelopes may be grouped in various combinations of primes and boosts, either as nucleic acids, proteins, or combinations thereof.

[0133] In certain embodiments the immunization includes a prime administered as DNA, and MVA boosts. See Goepfert, et al. 2014; “Specificity and 6-Month Durability of Immune Responses Induced by DNA and Recombinant Modified Vaccinia Ankara Vaccines Expressing HIV-1 Virus-Like Particles” J Infect Dis. 2014 Feb. 9. [Epub ahead of print].

[0134] HIV-1 Envelope selection A (54 envelopes):
[0135] w000.TF
[0136] w004.31, w004.54
[0137] w007.8, w007.21, w007.25, w007.34
[0138] w008.20
[0139] w009.19
[0140] w010.7
[0141] w020.15, w020.11, w020.24, w020.25
[0142] w022.6, w022.5, w022.9, w022.22
[0143] w030.20, w030.17, w030.21, w030.36, w030.26, w030.13, w030.32
[0144] w053.15, w053.29, w053.22, w053.8, w053.31, w053.9
[0145] w078.6, w078.36, w078.9, w078.26, w078.29, w078.30, w078.33, w078.17, w078.15, w078.27
[0146] w100.T3, w100.B10, w100.B2, w100.B4, w100.A11, w100.A13
[0147] w136.B10, w136.B5, w136.B2, w136.B23
[0148] w160.C1, w160.T3, w160.T4

[0149] HIV-1 Envelope selection B (27 envelopes): The bolded envelopes from selection A above:
[0150] w000.TF, w004.54, w020.15, w020.11, w020.25, w030.20, w030.17, w030.21, w030.36, w030.13, w053.15, w053.29, w053.22, w053.31, w078.6, w078.9, w078.33, w078.17, w078.15, w100.B2, w100.B4, w100.A13, w136.B10, w136.B5, w136.B2, w136.B23, w160.T4.

[0151] In certain embodiments the selections above could include additional envelopes from later time points. In certain embodiments, the selections above could include a D-loop mutant, or a combination thereof.

[0152] The selections of CH505-Envs were down-selected from a series of 400 CH505 Envs isolated by single-genome amplification followed for 3 years after acute infection, based on experimental data. The enhanced neutralization breadth that developed in the CD4-binding site (bs) CH103 antibody lineage that arose in subject CH505 developed in conjunction with epitope diversification in the CH505's viral quasispecies. It was observed that at 6 months post-infection in there was more diversification in the CD4bs epitope region in this donor than sixteen other acutely infected donors. Population breadth did not arise in the CH103 antibody lineage until the epitope began to diversify. A hypothesis is that the CH103 linage drove viral escape, but then the antibody adapted to the relatively resistant viral variants. As this series of events was repeated, the emerging antibodies evolved to tolerate greater levels of diversity in relevant sites, and began to be able to recognize and neutralize diverse heterologous forms for the virus and manifest population breadth. In certain embodiments, 54 envs are selected from CH505 sequences to reflect diverse variants for making Env pseudoviruses, with the goal of recapitulating CH505 HIV-1 antigenic diversity over time, making sure selected site (i.e. those sites reflecting major antigenic shifts) diversity was represented.

[0153] Specifically, for CH505 the virus and envelope evolution were mapped, and the CH103 CD4 binding-site bnAb evolution. In addition, 135 CH505 varied envelope pseudotyped viruses were made and tested them for neutralization sensitivity by members of the CH103 bnAb lineage (e.g, FIGS. 3). From this large dataset, in one embodiment, Env variants were chosen for immunization based on sequence diversity, and antigenic diversity, for example binding to antibodies in the CH103 lineage (FIGS. 1 and 2, Table 1).

[0154] In certain embodiments, the envelopes are selected based on Env mutants with sites under diversifying selection, in which the transmitted/founder (T/F) Env form vanished below 20% in any sample, i.e. escape variants; signature sites based on autologous neutralization data, i.e. Envs with statistically supported signatures for escape from members of the CH103 bnAb lineage; and sites with mutations at the contact sites of the CH103 antibody and HIV Env. In this manner, a sequential swarm of Envs was selected for immunization to represent the progression of virus escape mutants that evolved during bnAb induction and increasing neutralization breadth in the CH505 donor.

[0155] In certain embodiments, additional sequences are selected to contain five additional specific amino acid signatures of resistance that were identified at the global population level. These sequences contain statistically defined resistance signatures, which are common at the population level and enriched among heterologous viruses that CH103 fails to neutralize. When they were introduced into the TF sequence, they were experimentally shown to confer partial resistance to antibodies in the CH103 lineage. Following the reasoning that serial viral escape and antibody adaptation to escape is what ultimate selects for neutralizing antibodies that exhibit breadth and potency against diverse variants, in certain embodiments, inclusion of these variants in a vaccine may extend the breadth of vaccine-elicited antibodies even beyond that of the CH103 lineage. Thus the overarching goal will be to trigger a CH103-like lineage first using the CH505TF modified M11, that is well recognized by early CH103 ancestral states, then vaccinating with antigenic variants, to allow the antibody lineage to adapt through somatic mutation to accommodate the natural variants that arose in CH505. In certain embodiments, vaccination regimens include a total of 27 sequences (Selection B) that capture the antigenic diversity of CH505. In another embodiment, additional antigenic diversity is added (Selection A), to enable the induction of antibodies by vaccination that may have even greater breadth than those antibodies isolated from CH505.

[0156] In some embodiments, the CH505 sequences that represent the accumulation of viral sequence and antigenic diversity in the CD4bs epitope of CH103 in subject CH505 are represented by selection A, or selection B.

[0157] M11 is a mutant generated to include two mutations in the loop D (N279D+V281G relative to the TF sequence) that enhanced binding to the CH103 lineage . These were early escape mutations for another CD4bs autologous neutralizing antibody lineage, but might have served to promote early expansion of the CH103 lineage.

[0158] In certain embodiments, the two CH103 resistance signature-mutation sequences added to the antigenic swarm are: M14 (TF with S364P), and M24 (TF with S375H+T202K+L520F+G459E). They confer partial resistance to the TF with respect to the CH103 lineage. In certain embodiments, these D-loop mutants are administered in the boost.

### Example 4

### Immunization Protocols in Subjects with Swarms of HIV-1 Envelopes

[0159] Immunization protocols contemplated by the invention include envelopes sequences as described herein including but not limited to nucleic acids and/or amino acid sequences of gp160s, gp150s, gp145, cleaved and uncleaved gp140s, gp120s, gp41s, N-terminal deletion variants as described herein, cleavage resistant variants as described herein, or codon optimized sequences thereof. A skilled artisan can readily modify the gp160 and gp120 sequences described herein to obtain these envelope variants. The swarm immunization protocols can be administered in any subject, for example monkeys, mice, guinea pigs, or human subjects.

[0160] In non-limiting embodiments, the immunization includes a nucleic acid which is administered as DNA, for example in a modified vaccinia vector (MVA). In non-limiting embodiments, the nucleic acids encode gp160 envelopes. In other embodiments, the nucleic acids encode gp120 envelopes. In other embodiments, the boost comprises a recombinant gp120 envelope. The vaccination protocols include envelopes formulated in a suitable carrier and/or adjuvant, for example but not limited to alum. In certain embodiments the immunizations include a prime, as a nucleic acid or a recombinant protein, followed by a boost, as a nucleic acid or a recombinant protein. A skilled artisan can readily determine the number of boosts and intervals between boosts.

[0161] In certain embodiments an immunization protocol could prime with a bivalent or trivalent Gag mosaic (Gag1 and Gag 2, Gag 1, Gag 2 and Gag3) in a suitable vector.

### Example 5

### Env Mixtures of the CH505 Virus are Expected to Induce the Beginning of CD4 Binding Site BnAb Lineages

[0162] In one immunization regimen, the prime is M6, M5, M11 then groups of envelopes from the selection of 54 envelopes are added either sequentially or additively.

### Example 6

[0163] One of the major obstacles to developing an efficacious preventive HIV-1 vaccine is the challenge of inducing broadly neutralizing antibodies (bnAbs) against the virus. There are several reasons why eliciting bnAbs has been challenging and these include the conformational structure of the viral envelope, molecular mimicry of host antigens by conserved epitopes which may lead to the suppression of potentially useful antibody responses, and the high level of somatic mutations in the variable domains and the requirement for complex maturation pathways [1-3]. It has been shown that up to 25% of HIV-1—infected individuals develop bnAbs that are detected 2-4 years after infection. To date, all bnAbs have one or more of these unusual antibody traits: high levels of somatic mutation, autoreactivity with host antigens, and long heavy chain third complementarity determining regions (HCDR3s)—all traits that are controlled or modified by host immunoregulatory mechanisms. Thus, the hypothesis has been put forth that typical vaccinations of single primes and boosts will not suffice to be able to induce bnAbs; rather, it will take sequential immunizations with Env immunogens, perhaps over a prolonged period of time, to mimic bnAb induction in chronically infected individuals [4].

[0164] A process to circumvent host immunoregulatory mechanisms involved in control of bnAbs is termed B cell lineage immunogen design, wherein sequential Env immunogens are chosen that have high affinities for the B cell receptors of the unmutated common ancestor (UCA) or germline gene of the bnAb clonal lineage [4]. Envs for immunization can either be picked randomly for binding or selected, as described herein, from the evolutionary pathways of Envs that actually give rise to bnAbs in vivo. Liao and colleagues recently described the co-evolution of HIV-1 and a CD4 binding site bnAb from the time of seroconversion to the development of plasma bnAb induction, thereby presenting an opportunity to map out the pathways that lead to generation of this type of CD4 binding site bnAb [5]. They showed that the single transmitted/founder virus was able to bind to the bnAb UCA, and identified a series of evolved envelope proteins of the founder virus that were likely stimulators of the bnAb lineage. Thus, this work presents an opportunity to vaccinate with naturally-derived viral envelopes that could drive the desired B-cell responses and induce the development of broad and potent neutralizing antibodies. While the human antibody repertoire is diverse, it has been found that only a few types of B cell lineages can lead to bnAb development, and that these lineages are similar across a number of individuals [6,7]. Thus, it is feasible that use of Envs from one individual will generalize to others.

[0165] In certain embodiments the invention provides methods for selecting the Env immunogens, among multitude of diverse viruses that induced a CD4 binding site bnAb clonal lineage in an HIV-infected individual, by making sequential recombinant Envs from that individual and using these Envs for vaccination. The B-cell lineage vaccine strategy thus includes designing immunogens based on unmutated ancestors as well as intermediate ancestors of known bnAb lineages. A candidate vaccine could use transmitted/founder virus envelopes to, at first, stimulate the beginning stages of a bnAb lineage, and subsequently boost with evolved Env variants to recapitulate the high level of somatic mutation needed for affinity maturation and bnAb activity. The goal of such a strategy is to selectively drive desired bnAb pathways.

[0166] Broadly neutralizing antibodies likely will not be induced by a single Env, and even a mixture of polyvalent random Envs (e.g. HVTN 505) is unlikely to induce bnAbs. Rather, immunogens must be designed to trigger the UCAs of bnAb lineages to undergo initial bnAb lineage maturation, and then use sequential immunogens to fully expand the desired lineages. The proposed trial will represent the first of many experimental clinical trials testing this concept in order to develop the optimal set of immunogens to drive multiple specificities of bnAbs. The HVTN will be at the cutting edge of this effort.

[0167] The concept is applicable to driving CD4 binding site lineage in multiple individuals due to the convergence of a few bnAb motifs among individuals. The adjuvant will be the GSK AS01E adjuvant containing MPL and QS21. Other suitable adjuvants can be used. This adjuvant has been shown by GSK to be as potent as the similar adjuvant AS01B but to be less reactogenic using HBsAg as vaccine antigen [Leroux-Roels et al., IABS Conference, April 2013, [9].

[0168] 1. Mascola J R, Haynes B F. HIV-1 neutralizing antibodies: understanding nature's pathways. Immunol Rev 2013; 254:225-44.

[0169] 2. Verkoczy L, Kelsoe G, Moody M A, Haynes B F. Role of immune mechanisms in induction of HIV-1 broadly neutralizing antibodies. Curr Opin Immunol 2011; 23:383-90.

[0170] 3. Verkoczy L, Chen Y, Zhang J, Bouton-Verville H, Newman A, Lockwood B, Scearce R M, Montefiori D C, Dennison S M, Xia S M, Hwang K K, Liao H X, Alam S M, Haynes B F. Induction of HIV-1 broad neutralizing antibodies in 2F5 knock-in mice: selection against membrane proximal external region-associated autoreactivity limits T-dependent responses. J Immunol 2013; 191:2538-50.

[0171] 4. Haynes B F, Kelsoe G, Harrison S C, Kepler T B. B-cell-lineage immunogen design in vaccine development with HIV-1 as a case study. Nat Biotechnol 2012; 30:423-33.

[0172] 5. Liao H X, Lynch R, Zhou T, Gao F, Alam S M, Boyd S D, Fire A Z, Roskin K M, Schramm C A, Zhang Z, Zhu J, Shapiro L, Mullikin J C, Gnanakaran S, Hraber P, Wiehe K, Kelsoe G, Yang G, Xia S M, Montefiori D C, Parks R, Lloyd K E, Scearce R M, Soderberg K A, Cohen M, Kamanga G, Louder M K, Tran L M, Chen Y, Cai F, Chen S, Moquin S, Du X, Joyce M G, Srivatsan S, Zhang B, Zheng A, Shaw G M, Hahn B H, Kepler T B, Korber B T, Kwong P D, Mascola J R, Haynes B F. Co-evolution of a broadly neutralizing HIV-1 antibody and founder virus. Nature 2013; 496:469-76.

[0173] 6. Morris L, Chen X, Alam M, Tomaras G, Zhang R, Marshall D J, Chen B, Parks R, Foulger A, Jaeger F, Donathan M, Bilska M, Grey E S, Abdool Karim S S, Kepler T B, Whitesides J, Montefiori D, Moody M A, Liao H X, Haynes B F. Isolation of a human anti-HIV gp41 membrane proximal region neutralizing antibody by antigen-specific single B cell sorting. PLoS One 2011;6:e23532.

[0174] 7. Zhou T, Zhu J, Wu X, Moquin S, Zhang B, Acharya P, Georgiev I S, Altae-Tran H R, Chuang G Y, Joyce M G, Do K Y, Longo N S, Louder M K, Luongo T, McKee K, Schramm C A, Skinner J, Yang Y, Yang Z, Zhang Z, Zheng A, Bonsignori M, Haynes B F, Scheid J F, Nussenzweig M C, Simek M, Burton D R, Koff W C, Mullikin J C, Connors M, Shapiro L, Nabel G J, Mascola J R, Kwong P D. Multidonor analysis reveals structural elements, genetic determinants, and maturation pathway for HIV-1 neutralization by VRC01-class antibodies. Immunity 2013; 39:245-58.

[0175] 8. Lynch R M, Tran L, Louder M K, Schmidt S D, Cohen M, Dersimonian R, Euler Z, Grey E S, Abdool K S, Kirchherr J, Montefiori D C, Sibeko S, Soderberg K, Tomaras G, Yang Z Y, Nabel G J, Schuitemaker H, Morris L, Haynes B F, Mascola J R. The Development of CD4 Binding Site Antibodies During HIV-1 Infection. J Virol 2012; 86:7588-95.

[0176] 9. Leroux-Roels I, Koutsoukos M, Clement F, Steyaert S, Janssens M, Bourguignon P, Cohen K, Altfeld M, Vandepapeliere P, Pedneault L, McNally L, Leroux-Roels G, Voss G. Strong and persistent CD4+ T-cell response in healthy adults immunized with a candidate HIV-1 vaccine containing gp120, Nef and Tat antigens formulated in three Adjuvant Systems. Vaccine 2010; 28:7016-24.

### Example 7

### Longitudinal Antigenic Sequences and Sites (LASS): Computational Methods to Characterize Positively Selected Sites and Select Variant Sets for Reagent Design from Serial Samples

[0177] Abstract

[0178] One strategy for studying broadly neutralizing antibody (bnAb) development is to characterize the coevolution of virus and B-cell clonal lineages during affinity maturation and the development of neutralization breadth. Such longitudinal bnAb studies involve sequencing hundreds to thousands of Envelope (Env) variants from one donor. It is feasible, however to construct Envs reagents for protein expression and detailed analysis for only a fraction of these. Presented herein is a method to select a subset of variants that represents the gradual acquisition of selected mutations from among longitudinal sequences. It uses loss of the transmitted/founder (TF) virus, or the consensus of the first time point in the case of subjects that are enrolled during chronic infection, to identify sites that under strong positive selective pressure. Visualization tools have been developed to readily track mutations in these sites over time. An algorithm then is used to select Envs that represent the gradual acquisition of all recurrent mutations in the selected sites, sampling them in the context that they first appear in the subject. A detailed example of a retrospective application of this method to a subject, CH505, who has already been extensively studied, is provided to enable the assessment of how the method performed. Using 398 single-genome amplification (SGA)-derived Envs that spanned three years of infection, the algorithm identified 35 sites under putative immune selection. Encouragingly, these sites corresponded to verified immune targets: a T cell epitope, and epitopes recognized by neutralizing antibodies isolated from CH505: the CD4bs and the V3 loop. Thus, in this case patterns of mutations identified to be under selection were directly indicative of the antibody specificities of the subject. The algorithm identified 54 Envs that represent all recurrent mutations in selected sites. The Envs were well dispersed throughout the phylogeny, and represented the development of binding and neutralization in a set of 135 previously handpicked Envs. The algorithm chooses sequence sets with more recurrent mutations and less redundancy than would be chosen randomly or by hand. Thus, the algorithm objectively provides a minimal, manageable number of Envs to represent diversity in natural infection, to help study virus-antibody coevolution. This minimal representation of antigenic diversity is called an “antigen swarm.” Initially, this was developed as a strategy to explore mutational patterns and for reagent design. However, given the emergence of new vaccine technologies that may enable the use of high valency antigen cocktails, this approach could also be used to design a vaccine that mimics viral evolution in an individual who made potent bnAb responses.

[0179] Genetic sequencing of samples collected over time gives a dynamic view of how viruses evade host immunity while maintaining replication fitness. HIV-1 is a chronic infection, and persists as a diverse and evolving swarm of viral variants within an infected individual. HIV has a high mutation rate, and viral fitness is achieved by selection in an ever-changing immunological landscape within the host. Identifying mutations essential for immune escape, and simultaneously, those that may be important eliciting subsequent immune responses, can be biologically and computationally challenging. Given current state-of-the-art experimental practice, far more viral sequences can be obtained from a subject who is studied over time than can be cloned into constructs suitable for testing and analysis, necessitating down-selection for reagent design. Historically, this has typically been performed by inspection, often by picking some designated number of variants, (based on resources that can be applied to the problem), that represent different time points and different clades within a phylogenetic tree. Such strategies may miss the most relevant mutations, and may have large genetic distance between key variants. A computational strategy has been developed, working only from initial viral sequence data, to identify and visualize viral protein evolutionary “hot spots” and then to select compact virus sets that carry all candidate immune escape mutations. By inference, these sites might also be key in eliciting the ever-broadening immune response. This method uses the loss of the TF form of the virus as a measure of positive selection driven by immune response. An algorithm then chooses sequence variants that represent all recurrent amino acid mutations at each of the selected sites. By capturing each selected mutation as it first arises in the context of earlier and less divergent viruses, the algorithm captures the observed gradual accumulation of mutations as they arise. Such epitope diversification in vivo is associated with the development of a broadening immune response. Adjusting parameters fine-tunes how many sequences result. An advantage of the method is that to minimize costs, no more sequences are chosen than are necessary to represent the composite of variants detected. Use on a well-characterized set of Env sequences from a bnAb individual confirmed that the selected sites were concentrated in antibody contact areas, and that selected sequences represented diverse antigenic phenotypes. Such a compact set of variants is referred to as an antigen swarm, and suggest potential use of antigen swarms for reagent design, to characterize the evolving antibody responses, as well as for an antigen swarm vaccine.

[0180] Introduction

[0181] It is not yet known how to stimulate protective immunity against HIV-1 with broadly cross-reactive neutralizing antibodies (nAbs) via vaccination, and neutralizing antibody induction remains a central focus of HIV vaccine field. Neutralizing antibodies are immune correlates of protection in all antiviral vaccines licensed to date [1, 2], and administration of neutralizing antibodies can confer protection in SHIV challenge models in rhesus macaques [3, 4]. During the natural course of HIV infection, a single transmitted-founder (TF) virion typically establishes infection, and the virus population grows exponentially, with random mutations that initially follow a Poisson distribution of intersequence distances [5, 6]. The viral load eventually declines and resolves to a quasistationary set-point [7], influenced by both host and viral factors [8]. HIV is maintained as a continuously evolving population throughout chronic infection [9], with diversification driven by adaptive immune responses, including both antibodies [10-18] and T cells [19-21]. Mutations that facilitate immune evasion are positively selected and become more common, while mutations that result in a relative fitness disadvantage do not persist. Neutral mutations may also drift to higher frequency, with rates that depend on the effective population size [22].

[0182] Previous studies have revealed that viral diversification precedes the acquisition of breadth, which suggests antigenic diversity may be necessary for acquisition of bnAb breadth in vivo [15, 18], and also that several antibody lineages can concurrently impact selection on the same epitope region [16]. While essentially all HIV-1 infected individuals can elicit antibodies with some cross-reactive neutralization responses during the chronic phase of infection, and neutralization responses vary over a continuous spectrum across individuals [17]. Plasma samples from individuals with the most potent and broad antibody neutralization are frequently singled out for detailed study [23-26]. Such study includes isolation of monoclonal antibodies and investigations of both viral and B cell lineages to understand the immunological processes underlying elicitation of effective immune responses and inform strategistudyes for vaccine design [15, 16, 18, 27-29]. In general, autologous, strain-specific nAbs begin to develop in the initial months after infection, and rapidly select for viral escape variants [11, 14]. High titers of more broadly neutralizing antibodies develop in a subset of cases, but only after years of infection, and perhaps more in cases with persistently high levels of viral replication [30, 31].

[0183] Among the subjects with broad cross-reactivity characterized to date, the contemporary co-circulating autologous virus has escaped from an otherwise broadly-reactive neutralizing antibody response [32]. Antibodies that recapitulate much of the potency and breadth of polyclonal sera have been cloned from subjects with high bnAb titers [cite]. The developmental pathway of B cell immunoglobulin genes from early to later infection is an active research frontier, now only beginning to be understood [cite]. It remains unknown what properties of evolving viral Env proteins stimulate or facilitate the important transition from autologous to heterologous reactivity. Understanding these events should ultimately enable new strategies for immunogen design to elicit potent, broadly cross-reactive nAbs.

[0184] A continuing research priority has been to characterize virus co-evolution with antibodies in individuals who develop the greatest potency and breadth of neutralization [15, 16, 18, 29, 33, 34]. Working back from mature bnAb clonal lineages, through ancestral intermediates, ultimately to the unmutated germline precursor, has begun to help understand this process of bnAb development [15, 18, 27, 28, 33, 35-37]. To explore antibody/viral co-evolution, mutational patterns that are selected over time in both the antibody population, as it undergoes affinity maturation, and the virus population, as it evolves to evade the ongoing immune responses, are defined by sequencing and sequence analysis of serially obtained, or longitudinal, samples [15, 18].

[0185] Described herein is a new approach to such longitudinal sequence analysis, which involves two steps. The first part of our bioinformatics approach allows one to define and visualize sites that are under positive selective pressure in the viral population. Defining the sites under selective pressure can help infer the antibody specificities that are active in the plasma, and to identify key mutations for characterization during experimental follow-up studies. The second part of the approach is a computational method to down-select sequences objectively from a very large sequence sample, yielding a representative subset of viral variants. The resulting set of sequences is an “antigenic swarm,” which captures mutations in the sites that are under the most potent selective pressure as they first emerge in the evolving HIV-1 quasispecies [15, 18, 29]. The size of the sequence subset involves a trade-off between the cost of including more variants and the degree of selection to be represented. Our approach involves two parameters that can be adjusted to balance these two factors, explore the data, and choose the most representative set given experimental feasibility and sample-size limitations. This process has been worked through retrospectively in individual CH505, where extensive information regarding antibody interactions and targeted Env epitopes [15, 16] is available, to determine how well the relevant diversity is captured by our informatics method in this case. This approach can be used to select Envs (or similarly diversifying variants) as reagents, e.g. for Env production for synthesis and use in binding assays, or to generate pseudoviruses for use in neutralization assays. In turn, the resulting reagents can be used to study relationships between viral phenotype and genotype, and to investigate in better detail how neutralizing antibody responses develop by affinity maturation.

[0186] Resulting sets of antigens provide a useful baseline for basic research and may also inform immunogen design. A working hypothesis to explain the observation that bnAbs tend to arise late infection, after antigenic diversification has arisen in the subject, is that serial immune escape in vivo drives antibody lineages to adapt to the emerging viral variants, eventually enabling recognition of the diverse forms of the targeted epitope found in the circulating population. Thus, a polyvalent vaccine that represents Env diversity may be one strategy for inducing antibodies with greater breadth than single, invariant clonal antigens. Related work in vaccine design against HIV-1 has suggested that Env variants sampled during development of heterologous neutralization breadth could be administered as immunogens [38, 39]. Described herein is a a method for Env selection to ensure comprehensive representation of antigenic diversity.

[0187] Results

[0188] A process for antigenic swarm selection has been implemented, which consists of two phases. The first phase identified protein sites most likely to be under positive (diversifying) selection, by considering the extent to which the TF amino acid is “lost” at any one time-point during the longitudinal sampling period. This yielded a list of sites of interest, from which all amino acid mutations that arose over time were tabulated. The second phase selected sequences that represented the mutational variants among sites selected in the first phase. The two phases of analysis, and parameters that influenced the number of sites and sequences thereby obtained, are detailed below.

[0189] It is worth noting that the single-genome amplification (SGA) sequences analyzed here were obtained by limiting-dilution PCR, which provides genetic linkage across all of the env gp160, without recombination artifacts, and limited nucleotide substitution errors in cDNA synthesis [40]. Unlike Sanger sequencing from bulk PCR or large numbers of fragmentary high-throughput reads from unlinked templates, SGA sequences provide high-quality sequence data ideally suited to understand how viruses adapt to host immune responses over time [5, 14, 21, 40, 41]

[0190] Site Selection

[0191] TF loss varied across sites. Building upon recent studies of antibody/Env coevolution in the study subject CH505 [15, 16], first the strategy was applied to this subject to determine how well the method performed in a case where key epitopes have been defined and well characterized. 398 sequences from 14 time-points sampled over three years were aligned across 953 sites in the Env protein. FIG. 12 depicts TF loss per site for each time-point sampled, from week 4 through week 160 post-infection. Clearly, most sites show little or no TF loss. Sites with high levels of TF loss are candidates for key escapes due to immune selection. Because an insertion or deletion was counted relative to the TF virus as a change, rather than a missing datum, the hypervariable regions of V1, V2, V4, and V5 also showed TF loss, largely due to length variation. TF loss was used to list sites where frequency of the TF form fell below a fixed cutoff percentage. The cutoff is a parameter that can be adjusted as needed, as described below.

[0192] Initially dominated by the TF form, mutational variants developed over time, and displayed a variety of dynamics among sites with high TF loss. FIG. 13 depicts evolution of variant frequencies in subject CH505. All 35 sites shown in this figure had over 80% TF loss in at least one time point. The rate of TF loss was lower in some sites than in others. Such slow transitions could reflect the evolving immune response and newly arising selective pressure. In qualitative terms, there were four dynamic categories, designated i-iv. First (i), some sites showed replacement of the TF form with another single mutational variant, whether fast or slow, e.g. the V3 glycan shift at sites 332 (top-right panel “N332” in FIGS. 13) and 334. Next (ii), in some sites, TF replacements were followed by secondary mutations. For example, site 279, located in Loop D, was initially an asparagine, but a transient lysine mutation yielded to an aspartic acid after transient reversion to the TF asparagine (FIG. 13, top-left). Third (iii), some sites reverted to the TF form after high TF loss. For example, site 417, initially histidine, is predominantly an arginine from about six months to nearly two years after infection, but then reverts to the ancestral histidine. Finally (iv), some sites exhibited sustained polymorphisms. These were particularly common in hypervariable loops, where distinct subpopulations carried divergent forms. Simple shifts, like (i) above, were the most common form of TF loss. Serial mutations, like (ii) above, were also common and could be the direct result of serial escape, due to new pressures imposed by adaptation of the evolving antibody response to an initial escape mutation, driving continued selection. Alternatively, serial replacements could result from complex interactions with multiple antibodies in a polyclonal response [16], or pressures resulting from balancing fitness costs and/or compensatory mutations in a changing evolutionary milieu. Transient losses reverting to the TF form were rare, and different underlying reasons for this pattern could be at play, such as a fitness cost for a mutation that was carried along with a neighboring mutation, or a changing immunological environment in the host, which could transiently favor a mutation with a modest fitness cost [14, 42-44]. Sampling twenty or more sequences per time-point (median 25, range 18-53) across 14 time-points gives a sample size sufficient to detect uncommon variants; 95% confidence intervals on variant frequencies show similar dynamics with sampling uncertainty considered (FIG. 13).

[0193] Peak TF loss identified selected sites. The “peak” TF loss per site was defined as the highest TF loss in that site over all time-points sampled, and it was used to select candidates for sites under immune selection. In all, 15 sites completely lost the TF form during the three-year sampling period, while the other sites never reached 100% TF loss. The cumulative distribution of peak TF loss per site, depicted in FIG. 14, indicated that one-third of sites were strictly invariant and 64 sites lost over 50% TF. From this distribution, 35 sites with at least 80% peak TF loss for were selected further study and Env selection. The choice of an 80% cutoff might have been different for other data (addressed below) or for use in different contexts. Increasing the TF loss cutoff decreases the number of sites selected, and working with other cutoff values produces more or less selected sites for subsequent investigation, to be chosen in light of available resources.

[0194] Selected sites were consistent with antibody-driven selection. As illustrated in FIG. 13, the time at which each selected site started to emerge in the sampled virus population varied from one site to another. The cumulative amount of TF loss also varied, and was zero in sites that never changed. Cumulative TF loss had a simple geometric interpretation as the area above the dashed TF line in the plots of frequency over time that appeared in FIG. 13. Its calculation weighed TF loss for two consecutive samples by the amount of time elapsed between when the two samples were drawn. Cumulative TF loss was lower in sites that reverted to the TF form than in sites that quickly mutated away from the TF and never reverted. Sites were sorted by these two criteria; time to initial TF loss and cumulative TF loss, to obtain an informative representation of the accumulation of mutations among selected sites.

[0195] Table 2 lists the 35 selected sites with 80% TF loss, ranked by the earliest time at which any non-TF variant exceeded 10%, with ties resolved by cumulative TF loss sorted in descending order. Most (91%) of the selected sites occurred in gp120. In the context of the Env trimer structure, the selected sites formed localized clusters on the outer domain of gp120 (FIG. 15). The clustered patches of selected sites on gp120 corresponded to the three known immunological pressure regions in subject CH505. The first cluster of three selected mutations (412, 413, 417) was in a CTL epitope that was recognized early in infection in CH505, and so conferred CTL escape [16]. The second cluster of six selected sites (300, 302, 325, 330, 332, 334) was located within the V3 loop, or in the glycosylation site at its base. Two autologous neutralizing anti-V3 antibodies, DH151 and DH228 were isolated from subject CH505. Thus, some of these sites may be relevant to this lineage [45].

TABLE 2
Selected sites. CH505 Env sites with at least 80% TF loss in at least one time-point. The symbol
color in the left-most column indicates the appearance of each selected site in FIG. 15.

| | Peak | When | | Immune | |
|---|---|---|---|---|---|
| Site | loss | up | Rank | pressure | Notes |
| 4 | 87.5 | d701 | 33 | na | Signal peptide |
| 130 | 87.5 | d547 | 28 | CD4bs | PNG site at base of V1, near VRC01 contact [47] |
| 132 | 83.3 | d547 | 31 | CD4bs | V1 indels cause CH103 resistance [16] |
| 144f | 100 | d141 | 9 | CD4bs | V1 indels cause CH103 resistance [16] |
| 144g | 100 | d141 | 7 | CD4bs | V1 indels cause CH103 resistance [16] |
| 144h | 100 | d141 | 8 | CD4bs | V1 indels cause CH103 resistance [16] |
| 145 | 96.8 | d141 | 11 | CD4bs | V1 indels cause CH103 resistance [16] |
| 147 | 91.7 | d547 | 29 | CD4bs | V1 indels cause CH103 resistance [16] |
| 151 | 83.3 | d371 | 24 | CD4bs | V1 indels cause CH103 resistance [16] |
| 185 | 83.3 | d547 | 32 | CD4bs | Signature site for CD4bs bnAb b12 [51] |
| 234 | 100 | d211 | 15 | CD4bs | Signature site for CD4bs bnAbs VRC01 & NIH45-56 [51] |
| 275 | 91.7 | d547 | 26 | CD4bs | Loop D, CH103 contact, CH235 resistance [15, 16] |
| 279 | 95.8 | d28 | 1 | CD4bs | Loop D, CH235 resistance, CH103 sensitivity [15, 16] |
| 281 | 100 | d64 | 3 | CD4bs | Loop D, CH235 resistance, CH103 sensitivity [15, 16] |
| 300 | 100 | d211 | 14 | V3 loop | V3 autologous nAb in CH505 [45] |
| 302 | 100 | d211 | 16 | V3 loop | V3 autologous nAb in CH505 [45] |
| 325 | 83.3 | d141 | 12 | V3 loop | V3 autologous nAb in CH505 [45] |
| 330 | 100 | d157 | 13 | V3 loop | V3 autologous nAb in CH505 [45] |
| 332 | 100 | d141 | 5 | V3 loop | V3 autologous nAb in CH505 [45] |
| 334 | 100 | d141 | 6 | V3 loop | V3 autologous nAb in CH505 [45] |
| 347 | 83.3 | d371 | 23 | CD4bs | 15-17 Angstroms from CH103 contacts |
| 356 | 100 | d547 | 25 | CD4bs | Adjacent to CD4bs bnAb 12A12 signature [51] |
| 398 | 91.3 | d371 | 22 | CD4bs | 15-17 Angstroms from CH103 contacts |
| 412 | 83.3 | d121 | 35 | CTL epitope | CTL epitope V4 loop [16] |
| 413 | 88.2 | d64 | 4 | CTL epitope | CTL epitope V4 loop [16] |
| 417 | 91.2 | d51 | 2 | CTL/CD4bs | CTL epitope V4 loop/CD4bs bnAb b12 contact [16] |
| 460 | 100 | d371 | 21 | CD4bs | V5, CH103 contact region, resistance [15, 16] |
| 462 | 89.3 | d211 | 19 | CD4bs | V5, CH103 contact region, resistance [15, 16] |
| 463e | 100 | d371 | 20 | CD4bs | V5, CH103 contact region, resistance [15, 16] |
| 464 | 100 | d211 | 18 | CD4bs | V5, CH103 contact region, resistance [15, 16] |
| 465 | 100 | d211 | 17 | CD4bs | V5, CH103 contact region, resistance [15, 16] |
| 471 | 87.5 | d547 | 27 | CD4bs | CH103 contact [16] |
| 620 | 91.7 | d953 | 34 | na | gp41 |
| 640 | 83.9 | d547 | 30 | na | gp41 |
| 756 | 92.9 | d141 | 10 | na | gp41 cytoplasmic tail |

[0196] The third cluster, in the CD4bs, is the most complex. The CD4bs is the target of both the CH103 bnAb lineage [15] and the CH235 nAb helper lineage [16] in subject CH505. Many of the 32 selected gp120 sites included structurally defined contacts for CD4 [47, 48], and several previously studied CD4bs bnAbs, including VRC01 [47, 48], NIH45-46 [49], and b12 [50]. Although the current study is retrospective, this pattern of mutations would have indicated the presence of CD4bs antibodies in the subject, as well as indicate when they were beginning to exert selective pressure, even prior to isolation of nAb lineages. As expected, CH103 contacts and resistance mutations were well represented among the selected sites [16]. Three selected sites (279, 281, 275) were localized to CH103 light-chain contacts near loop D (FIG. 15B), a region that rapidly accumulated mutations as a result of escape from the autologous CD4bs neutralizing antibody CH235; these mutations rendered the virus more susceptible to the CH103 early lineage members. Six CH103 heavy-chain contacts (FIG. 15C) in and near V5 (460, 462-465, 471) were also among the selected sites, and mutations in this region conferred CH103 resistance. V1 loop mutations also conferred CH103 resistance, and seven sites in V1 were among the 35 selected sites (132, 144f, 144g, 144h, 145, 147, and 151). Three of these were inserted together in V1 after position 144. Finally, five additional selected sites are known to be important for other CD4bs bnAb interactions, providing indirect evidence that they may be important for either CH103 or CH235. These are: 417, a contact for the CD4bs bnAb b12 [50], and 185, a V2 region signature sites for b12 [51]; 234, a signature site for CD4bs bnAbs VRC01 and NIH45-46 that is near Loop D [51]; the glycosylation site N130, adjacent to a VRC01 contact [47]; and position 356, adjacent to a 12Al2 signature [51]. The selected sites that were relevant to other antibodies noted above were identified using the Los Alamos HIV-database genome browser and CATNAP tool (hiv.lanl.gov). Thus 29 of the 35 selected sites, or 83% are related to the three epitopes that were functionally defined in this subject, despite these sites being simply and objectively identified based solely on the TF loss criterion (Table 2). Of the six sites that were not directly related, three were gp41 sites (620, 640, 756) and one was in the signal peptide (position 4). The other two (398 and 347) were clustered near position 356 in gp120, and all three were near but not in the CH103 contact region (indicated in FIG. 15C as 10-17 Angstroms away from CH103 contacts).

[0197] To consider what sites might be missed by the TF-loss criterion, the localization of sites that never reach 80% loss was explored. The 365 sites that varied were dispersed over the entire protein, as expected. Requiring multiple mutations among all 398 available sequences, regional patterns appeared in the spatial distribution of mutations (FIG. 22). Positions with three or four mutations began to show a clear focus towards immunologically targeted regions. This suggests that high TF loss may exclude mutations that occur in immune-targeted regions, and mutations in these sites may have phenotypic consequences for immunological sensitivity. Several localized clusters of sites were apparent, which may indicate other antibody targets (FIG. 22), whether transient, weakly selected, or just beginning to show selection at the end of the study period. However, these sites were not under the same high degree of selective pressure as sites in which the TF form was depleted. LASS allows investigators to target the most highly selected sites for further study, and adjust the threshold according to what is practical for reagent design.

[0198] A concise representation of selected sites was to string them together to form “concatamers” of 35 amino acids. The order of sites in concatamers did not follow the primary Env sequence, but rather by when non-TF mutations first emerged and cumulative TF loss suggested a cumulative progression of mutations. Using modified sequence logos [52, 53], in which symbol height indicates frequency in a sample, shows this progression over time clearly (FIGS. 16A-16C). The top row (FIG. 16A) summarizes mutation frequencies from all 398 Envs sequenced over the first three years of infection in this individual. Below that (FIG. 16B), rows were stratified to summarize frequency in each sample, first for the TF virus (day 0), then for 14 plasma samples (day 28 through day 1121, i.e. week 4 through week 160, post-infection). To facilitate comparison, only non-TF mutations appear in these rows, TF frequencies are left blank, and alignment gaps are included as grey bars to highlight insertions and deletions.

[0199] Electrostatic charges of amino acid side chains, depicted by symbol colors (FIG. 16), changed polarity in 25% of the gp120 sites (279, 144h, 463e, 460, 347, 356, 275, 147) but not in gp41 sites. Gain or loss of N-linked glycosylation motifs appeared in 13 of the 32 (41%) gp120 sites but none of the gp41 sites. The representative sequences selected by the next stage of analysis were also depicted in this manner (FIG. 16C).

[0200] Swarm Selection

[0201] Algorithm. The swarm-selection algorithm is outlined as a flow-chart in FIG. 17. After the initial definition of sites deemed to be under selective pressure, based on the loss of the TF amino acid over time, it then consists of two passes through the sequences. The first pass (top half of FIG. 17) tabulates all mutations in the selected sites, among all available sequences. Mutations that only ever occur once in the full data set (or some other number of times, specified by the user) are omitted. This table is used on the second pass to keep track of which mutations have been included in the growing swarm. The second pass (lower half of FIG. 17) iterates over the time-points sampled, starting with the earliest time point, to include any mutations listed in the table. When a sequence is added, the table is updated to indicate the mutations that it carries have been included.

[0202] The algorithm is deterministic, meaning it will always produce the same set of sequences from a given alignment, because the algorithm does not make any random choices, and does not depend on the order in which sequences are provided in the input alignment. The algorithm was made efficient through use of vector operations and computes distance matrices only when they are needed to choose between otherwise ambiguous alternatives. Its computational complexity is expected to require no worse than a linear increase with the number of sequences in the input alignment. That is, doubling the number of input sequences should no more than double the expected run time.

[0203] Each mutation observed more than once in a selected site will ultimately be included in the antigenic swarm. The algorithm isolated mutations of interest in the least divergent sequence background possible, among available sequences sampled. It did this by progressively covering mutations that occurred in selected sites in the first time-point they appeared, and by representing them with the sequence most similar to the TF or, to resolve ties, the sequence most similar to those under consideration (lower-right box in FIG. 17).

[0204] Objective choice of representative variants among selected sites. The algorithm identified 54 Envs that covered variant diversity at the 35 sites selected by TF loss. Table 3 summarizes these as concatamers. Algorithm selection criteria had at least two clear consequences. First, the gradual accumulation of mutations found in early infection was deliberately mimicked using this strategy. Second, the appearance of each new mutation of interest is, by design, relatively isolated from other accumulating mutations emerging in the within-host virus population. Therefore, to the extent possible given sampling, each mutation in each the selected sites will be expressed in a context as close as possible to the form of the Env in which it was embedded when it first began to appear in the viral population at a high enough level to be sampled. By using the antigenic swarm to characterize variation among neutralization phenotypes in the population, if a particular mutation conferred a phenotypic change in either antigenicity or neutralization susceptibility of an isolate, then that change would be identified relative to the other mutations naturally occurring in the sampled virus population.

TABLE 3
Selected Envs. Concatamers (35 sites with at least 80% TF loss) in antigenic
swarm of 54 Envs, selected to represent polymorphisms among 398 full-
length Envs from CH505. The sequences associated with the Genbank accession
numbers KC and KM are incorporated by reference.

| Name | Accession | Concatamer |
|---|---|---|
| w000.TF | KC247556 | NHVTNO---VADYNTK--N-KOKIHEGOOETDMGR |
| w004.31 | KC247583 | .....................-............. |
| w004.54 | KC247604 | K.................................. |
| w007.8 | KM284749 | KR................................. |
| w007.21 | KM284732 | ..................................Q |
| w007.25 | KM284734 | ............................N...... |
| w007.34 | KM284744 | ...I............................... |
| w008.20 | KM284762 | ..A................................ |
| w009.19 | KM284781 | ..G................................ |
| w010.7 | KM284714 | .N................................. |
| w020.15 | KC247489 | ....OS....T........................ |
| w020.11 | KC47485 | ..........TN....................... |
| w020.24 | KC247495 | .RA......AT........................ |
| w020.25 | KC247496 | .R....ATO.......................... |
| w022.6 | KC247523 | ..AIOSATO...H...................... |
| w022.5 | KC247522 | .RA.OSATO....S..................... |
| w022.9 | KC247525 | ..GIOS.................-........... |
| w022.22 | KM284717 | ...O............................... |
| w030.20 | KC247541 | ..AIOSATOA......TNTO............... |
| w030.17 | KC247532 | D.GOOSATO.......TD................. |
| w030.21 | KC247535 | .RA.OSATO...........E.............. |
| w030.36 | KC247549 | ....OSATO.....O.TD................. |
| w030.26 | KC247539 | .RG.OS....-....NTD................. |
| w030.13 | KC247529 | ..DPOS............................. |
| w030.32 | KC247546 | .RG.OSATO.......TD-................ |
| w053.15 | KC247614 | D.G.OSATOA..HSONFT.E.-.L........... |
| w053.29 | KC247625 | .RAIOSATOA..HSONFT.E.-....E........ |
| w053.22 | KC247620 | DRGIOSIEIAG.HSONFT.E.TE............ |
| w053.8 | KC247632 | DRGIOSATOA..HSONFT.E.T..Q.......... |
| w053.31 | KC247628 | DRGIOSAT....HSON....N-............. |
| w053.9 | KC247633 | DRGIOSIEIAG.HSONFT.E.TE....N..I.... |
| w078.6 | KC247664 | DRGIOSOS.AS.HSONTN.OE-............. |
| w078.36 | KC247655 | DRGIOSTAAAS.HSON..S.O-.-....SD..... |
| w078.9 | KC247667 | DRG.OSTAA.S.HSONFT.E....QK..S...... |
| w078.26 | KC247645 | DRGIOSTAAAS.HSON..S.O.E.NK..S...... |
| w078.29 | KC247647 | DRGIOSTAAAS.HSONTN..-..-L..NS.A.... |
| w078.30 | KC247649 | ..A.OSATOA..HSON....N-......D...... |
| w078.33 | KC247652 | ..A.OSATOA..HSONT.O.N-.....N..I.T.. |
| w078.17 | KC247639 | DRG.OSATOA..HSONFT.EE..LDK.D..IG... |
| w078.15 | KC247637 | DRGIOSATOA..HSON..D..TEL.KES....... |
| w078.27 | KC247646 | DRGIOSATOA..HSONTDD..TEL.KES....R.. |
| w100.T3 | KC247401 | DRGIOSATO..NHSONTDD.ETEL.KEN..I.RS. |
| w100.B10 | KC247386 | DSG.OSATOA..HSONTDD....LDKEN..I.... |
| w100.B2 | KC247387 | .RAIOSIK.AG.HSON....N...D.V........ |
| w100.B4 | KC247389 | DRGIOSATO...HSON..S.O...DKE.K....D. |
| w100.A11 | KC247376 | D.S.OSATOA..HSONTNTOE-..D.E.KD..... |
| w100.A13 | KC247378 | ..A.OSATOAV.HSONTNTOE-.......D..... |
| w136.B10 | KC247404 | D.GIOSATOADNHSONTD.E-TELDKES.DIY.S. |
| w136.B5 | KC247429 | ..A.OSATOAV.HSONTESK-.E.O..Y.DI.... |
| w136.B2 | KC247411 | D.G.OSTVAA-.HGONIDOT--E.O.......RD. |
| w136.B23 | KC247414 | D.A.OSIK..G.HSONTEST-..VD....N...D. |
| w160.C1 | KC247465 | ..A.OSVTOAV.HSONTGST-...D..Y.D..TV. |
| w160.T3 | KC247482 | D.SIOSATOA.NHSONTD.E-TELDKVND.IGRD- |
| w160.T4 | KC247483 | D.A.OSTVA.S.HSONPD..-...G...DN..... |

[0205] Swarm variant frequencies (FIG. 16C) resembled variant frequencies sampled in the virus population (FIG. 16A), except for the deliberate inclusion of rare mutations at selected sites, which were less readily apparent in the larger population. Mutations seen only once among all of the sequences obtained were not required for inclusion, but all mutations in selected sites seen in two or more of all the sequences were represented by the 54 selected Envs. Mutations that occurred only once were not considered, as they are more likely to represent random mutations or sequencing error than mutations that occurred more frequently. The adjustment of this criterion to evaluate its effect on the number of Envs that were selected is discussed herein.

[0206] Random sequence selection. A resampling experiment was performed to evaluate the swarm-selection algorithm against a null distribution, which might be sampled by less informed methods. To eliminate multiple copies of the same Env sequence, the full-length Envs that had been normalized were randomly sampled. Removing duplicates and excluding Envs with premature stop or incomplete codons gave 260 distinct Envs, from which the same number of sequences as in the swarm set were repeated resampled, without replacement. FIG. 18 compares the null distribution from resampled results with the algorithmically chosen swarm. In our set of 54 selected Envs, no concatamers were duplicated, i.e. each Env carried a distinct combination of amino acids in the 35 positions of interest. Because the sites represented progressive adaptation of the virus in CH505, it was expected that each concatamer would have distinct phenotypic properties for sensitivity to the co-evolving antibody response, which could be identified by assaying each variant against longitudinally obtained plasmas or mAbs isolated to represent a developing lineage. (This is shown below, under “Antigenic Contexts”.) In contrast, among the randomly chosen sets of 54 Envs, redundancy among concatamers was common. Resampling 1,000 replicates gave a median of 40 distinct concatamers with 95% CI from 34 to 45 (FIG. 18A).

[0207] A comparison was made as to how many of the non-TF mutations tabulated in the first pass of the algorithm through all 398 sequences were covered. The antigen swarm set was designed to cover 92 distinct mutations that arose in the 35 selected sites. As expected, random sampling of Envs gave consistently lower coverage of the mutations needed (median 77; 95% CI: 69 to 84) than the 92 mutations that were included by the swarm-selection algorithm (FIG. 18A). This indicates that random sets of the same size do not capture all of the mutations that were considered to have the most potential relevance to antibody sensitivity.

[0208] Further, hierarchical dendrograms were computed from Hamming distance matrices for swarm and random sets, and the outcomes were summarized as clustering coefficients. The clustering coefficient, a dimensionless quantity, is the mean distance (from 0 to 1) at which sequences cluster together. It summarizes the distribution of terminal branch lengths as the expected similarity (the complement of normalized distance) among terminal branches [54]. To give an intuition for how this coefficient works, FIG. 18 also depicts the dendrogram from the swarm set, and compares it with the resampled sets that gave lowest (“min”) and highest (“max”) coefficients. The selected Envs had a lower clustering coefficient (65%) than sets of randomly selected sequences, which had a median of 79% and 95% CI: 72-80% (FIG. 18). The lower clustering coefficient indicates less hierarchical grouping structure, i.e. lower overall relatedness, among subsets of concatamers from the selected Envs than exhibited by the random sequence sets [54].

[0209] These metrics compared sequence sets from the swarm selection algorithm with null distributions that were obtained by random selection. Because the three metrics are only loosely correlated, they measure different aspects of selected sets of sequences. This appears to be the first attempt to establish criteria to quantify how well any subset of sequences from a larger related set represents diversity (distinct concatamers), polymorphisms (mutations included), and progressive divergence (clustering coefficient) in the larger set.

[0210] Phylogenetic and antigenic contexts. The phylogenetic context of Envs represented in the swarm set showed that selected sites persisted against the scattered background of ephemeral mutations (FIG. 19). Selected Envs were widely distributed over the tree. The earliest selected Envs (weeks 4-10) tended to carry single mutations, while some later Envs represented large clades sampled only in one or two time-points, such as the sequence w160.T3, which appears near the bottom of the tree.

[0211] ELISA binding assays with mAbs from the CH505-derived CH103 CD4 binding site bnAb B cell lineage were available for gp120s synthesized from a subset of 27 selected Envs (FIG. 20). Binding assay results confirmed that selected viruses exhibited diverse antibody sensitivities, which increased with maturation of the bnAb lineage and generally followed the progression of mutations away from the TF virus (FIG. 20).

[0212] Similarly for neutralization sensitivity, 26 selected Envs were among the 121 Env-pseudotyped viruses tested for sensitivity to neutralization by mAbs of the CH103 lineage (FIG. 21). Selected Envs represent the range of sensitivities among viruses tested, reflecting the diversity of variants that developed in response to sustained selection for neutralization escape.

[0213] In FIG. 23, neutralization titers from all previously hand-selected viruses clearly show the development of neutralization breadth in phylogenetic context. Envs at the top of the tree are broadly susceptible to many antibodies in the CH103 lineage. Envs that evolved later appear lower in the tree. Neutralization breadth was acquired later in bnAb ontogeny, which is clear as a gradient of increasing potency from the unmutated ancestor (left) to the mature CH103 bnAb (right). By selecting Envs that represent genetic diversity sampled during bnAb development, the method selects Envs that represent relevant antigenicity over time.

[0214] Swarm Size Adjustments

[0215] A main goal of this procedure is to enable down-selection from a large set of Env sequences, an Env subset that recapitulates development of antigenic diversity in the subject, given realistic experimental and cost constraints. Amino acid sites that were most likely under strong selective pressure were identified first (an important analysis step in its own right), and then sequences were chosen to represent diversity found in those sites. Having more available sequences per time-point allows a user to choose sites with more complete TF loss. To explore how the algorithm functions when applied to larger data sets, it was applied to additional acutely infected study participants with much more extensive sampling, CH694 and CH848.

[0216] The cutoff used for loss of the TF form determined how many sites were selected. In turn, this influenced the number of sequences, here Env variants, in the antigenic swarm sets intended for synthesis for phenotypic assays (Table 4). Similarly, the minimum variant count reduced the number of sequences selected by excluding rare mutations. For example, a minimum variant count of two excluded mutations that only ever appeared once. If one did not wish to include sequences that capture each isolated mutation found in selected sites, the size of the resulting reagent set defined by the algorithm could be reduced. By exploring different parameter settings, investigators can evaluate the impact of including variants that represent increasingly rare mutations, in light of resources available for experimental reagents. Unpublished Env sequences from two additional study participants with much greater sequencing depth and more longitudinal samples than individual CH505 provided an opportunity to consider effects of varied parameters (Table 4). In these cases, increasing the TF loss cutoff to 95% or 100% was necessary to preserve a desired swarm size of 100 Envs chosen from over a thousand Env SGA sequences.

TABLE 4
Size adjustment. Number of sites and sequences selected with varied TF loss cutoff and
minimum variant counts, compared for three serially sampled, acutely infected subjects.

| | | CH505 | CH694 | CH848 |
|---|---|---|---|---|
| Time-points sampled | | 14 | 26 | 32 |
| Latest time-point, days post-infection | | 1121 | 1560 | 1720 |
| Sequences by single-genome amplification | | 398 | 1104 | 1184 |
| Median (and range) sequences per time-point | | 25 (18, 53) | 40 (30, 62) | 35 (28, 79) |
| Sites selected with TF loss cutoff 80% | | 35 | 74 | 96 |
| Envs selected with min variant count | 1 | 54 | 131 | 198 |
| Sites selected with TF loss cutoff 90% | | 23 | 64 | 85 |
| Envs selected with min variant count | 1 | 38 | 118 | 191 |
| Sites selected with TF loss cutoff 95% | | 17 | 54 | 79 |
| Envs selected with min variant count | 1 | 29 | 105 | 175 |
| | 5 | 24 | 79 | 132 |
| | 10 | 18 | 73 | 122 |
| | 15 | 18 | 65 | 119 |
| | 20 | 16 | 61 | 113 |
| Sites selected with TF loss cutoff 100% | | 15 | 36 | 65 |
| Envs selected with min variant count | 1 | 25 | 83 | 156 |
| | 5 | 20 | 63 | 121 |
| | 10 | 15 | 58 | 111 |
| | 15 | 15 | 52 | 108 |
| | 20 | 13 | 51 | 102 |

[0217] A large proportion of variants are required to represent each recurrent mutation among selected sites from hypervariable loop regions. An alternative approach may be to emphasize only those sites that can be mapped onto HXB2, and consider hypervariable regions separately. This approach assumes it is not essential to sample each particular form that appears in disordered regions, such as the hypervariable portions of V1, V2, V4, and V5. Instead, it emphasizes covering all variants among more ordered regions and picking up the linked variants in disordered regions without sampling them completely. If only distinct HXB2 positions were counted and represented, then 80% TF loss with CH848 gives 65 sites and 127 sequences against 970 sequences obtained through peak breadth at d1432. These 127 sequences capture all 209 mutations (including indels) in the 65 HXB2 positions that appear more than once. Similarly, for CH694, the algorithm chose 112 sequences from 1103 Envs to represent 181 mutations that appeared more than once over 59 sites with at least 80% TF loss.

[0218] Chronic Infection

[0219] These methods were developed initially to select sequences from longitudinal studies beginning early in infection, where the TF virus is known or reliably inferred, and the progression of escape mutations is readily apparent. This is not true for chronic infection. Still, it may be desirable to select a subset of sequences that represent diversity in chronic infection samples. To evaluate the algorithm ability to select an antigenic swarm from a chronic infection, the algorithm was applied to sequences from a study participant enrolled in chronic infection, designated CH457 [45]. 205 plasma SGA Envs from ten sample time-points were analyzed (median was 20 sequences per time-point; the distribution ranged from 12 to 35). In the chronic enrollment sample, five of twenty Envs exactly matched the within-time-point consensus. One of these (w0.e18) was used as the reference to compute variant frequencies. No variation was detected in 582 of 888 aligned sites, and an 85% cutoff identified 35 sites that were candidates for strong positive selection (FIG. 23). Nine of the 35 sites are located in gp41.

[0220] With singleton variants excluded, the algorithm selected a swarm of 44 Envs (FIGS. 24A-24C). The progressive accumulation of mutations among concatamers of selected sites is less clear in this chronically infected subject than in acute infection (cf. FIG. 16B). Furthermore, sites that appear to be under selection in the window of time studied are not clearly associated with two epitope regions, as was the case of CH505, where there was a strong imprint of CD4bs and V3 antibodies selection, and indeed antibodies with these specificities were isolated from the subject. In the case of CH457, most of the selected sites were located were not identified in the 2015 Los Alamos Database as being relevant to particularly antibodies, although two sites were in the MPER region of gp41 (667, 671) and two sites were predicted signatures of the 2F5 MPER antibody (640, 351). In addition, one site was associated with CD4bs antibodies: a changing glycosylation pattern at 461, which contacts CD4 and the CD4bs bnAbs VRC01 and NIH45-46. Two of the selected sites (651, 640) have been noted to be CD4bs antibody signatures [51]. A potent CD4bs bnAb CH27 was isolated from subject CH457, but the virus isolated from CH47 plasma had escaped by the time of enrollment, although archived provirus from CH457 cell-associated DNA was still sensitive. CH13, a weaker CD4bs nAb capable of only neutralizing Tier 1 viruses, was isolated, and may have been exerting weak selective pressure in the last weeks sampled.

[0221] The phylogeny indicated a persistent, divergent secondary clade, represented by 24 of 205 plasma Envs (FIG. 25). This clade was not introduced by misalignment nor by simple recombination, and was also represented by cellular provirus sequences [45]. Though the divergent clade was undetected among sequences from the enrollment sample, it was represented by 14 of the 44 Envs selected (FIGS. 24A-24C). Thus, the algorithm can be used for both acute and chronic Env sequential sequence analysis and swarm design.

[0222] Discussion

[0223] The task of selecting representative variants from a larger set for follow-up studies from longitudinal samples is routine, but can be complex when choosing from hundreds to thousands of sequences. Furthermore, while methods for isolating bnAbs from HIV-1 infected subjects and vaccinees are rapidly improving, it remains a challenging task. The approach described herein suggests the task can be divided into two main parts, identification and tracking of selected sites within a subject, and identifying sequences that represent the antigenic diversification in that subject. A computational approach (LASS) to automate these tasks has been developed.

[0224] First, transmitted-founder loss is used in one or more samples in a longitudinal study as a simple way to identify sites under selective pressure. Despite the existence of a variety of methods to test for positive selection [55, 56], their utility to identify sites under positive selection in the context of within-subject viral evolution during acute infection is limited due to statistical power for inference. In contrast, the loss of the TF form at any one time-point is a simple and inclusive measure. In CH505, sites selected by this criterion were focused in regions that were highly relevant to the adaptive immune responses that were previously identified in the subject [15]. This suggests that in future studies, structural localization of selected sites could be used to raise hypotheses about specificities of bnAbs in plasma. Furthermore, the timing of TF loss identifies these important mutational events, and could help determine when antibodies exert the most selective pressure. Such information could guide the search for monoclonal antibodies in subjects with potent nAbs, by focusing on antibody specificities that recognize the epitopes under selection, and by aiding in selecting the sample used to isolate new bnAbs in a subject who was sampled over several years of follow-up.

[0225] Second, a rational, objective method is provided to guide the selection of Env sets for experimental study from large sequences sets sampled over time. LASS can select sets of sequences that represent gradual antigenic diversification induced during bnAb development, ensuring that all variants in sites identified by TF loss are represented in an Env reagent set. The method is computationally efficient, scaling linearly with the number of sequences, and minimizes redundancy, selecting only as many variants as are necessary to represent diversity in sites selected by TF loss. The algorithm starts with sequences most closely resembling the form that established the infection, and gradually increases diversity in a manner that parallels natural infection.

[0226] LASS was used to identify selected sites and representative sequence subsets in longitudinal samples from three acutely infected subjects and one subject sampled only during chronic infection. SGA sequences were analyzed from all four subjects, providing intact env gp160s with no recombination artifacts and minimal error [5, 14, 21, 40, 41]. While this provides optimal conditions, the approach could also be used in other longitudinal study designs and sequencing strategies.

[0227] In related research, sequence selection has been represented as a set-coverage problem [57], and networks of covarying sites are identified from a population-level alignment, which represents a particular clade [58], not a within subject alignment as in our case. A limitation of our approach, which will be addressed, is that sites are treated independently, while covariation between sites may influence variant suitability and TF loss. Considering covariation may potentially facilitate identification of smaller representative swarm sets. However, by progressively adopting mutations in the context of variant sequences where they first arise in the sequence sets, the swarm sets, by definition, allow the study of mutations in the context of the natural pairings as they were found in vivo. This strategy also has a potential advantage over site-specific mutagenesis, which necessarily studies mutations in isolation. A mutation observed in a later time-point and introduced into the TF, for example, may not have the same phenotypic consequences as it does in the background of the Env in which it arose, so the ability to study related natural variants isolated serially may be ultimately more informative.

[0228] Virus diversification precedes, and thus may drive, the development of neutralization breadth in HIV-1 infection [16, 18], and exposure of a neutralizing antibody lineage during affinity maturation to a gradual increase in antigen diversity could result in selection of antibodies with increased breadth. Thus, mimicking in vivo diversification has been proposed as a possible vaccination strategy [15, 18, 59-61]. With recent technological advances, it is becoming feasible to test vaccine designs that not only include 5-10 antigens, but potentially between 50-100 antigens, administered as DNA in either in series or in combination [62, 63]. As LASS uses efficient algorithm to identify candidate sets of antigens with progressively increasing diversity at important sites in polymorphic viral proteins, in could be used to aid in the design for such “antigen-swarm vaccines.” An additional potential use of the algorithm, not described here, is to analyze large antibody sequence data sets to identify, analyze selection, and select a representative subset of antibody sequences from clonal lineages of for detailed study. For example, the algorithm could be used to identify key members of antibody clonal lineages as mutations arise for HIV-antibody co-evolution studies.

[0229] In summary, computational methods have been developed to identify and track selected sites in longitudinal data, and to use these selected sites to aid in down-selecting sequence sets for reagent design, or for testing the “antigen swarm” vaccine concept. When applied to longitudinal HIV samples, a retrospective evaluation of viral sequences from the intensely studied subject CH505 showed that the LASS provided meaningful results, highlighting selected sites that were indeed under immune selective pressure, and building a non-redundant collection of sequences tailored to characterize the phenotypic consequences of those mutations. LASS may be useful in many contexts, such as assisting in bnAb isolation, as well studies of other viral infections, and studies of antibody evolution.

[0230] Methods

[0231] Site Selection

[0232] Transmitted-founder (TF) loss is the proportion of sequences sampled per time-point that have lost the ancestral TF state. This is an efficient way to select rapidly evolving sites. Here no information other than TF loss was considered, though such information could be used to select sites. This could include signature sites associated with neutralization assay outcomes and antibody contact residues from structural data, if available.

[0233] The starting point was env cDNA amplicons sequenced via single-genome amplification (SGA), also known as limiting-dilution PCR, sampled longitudinally, beginning early (3-6 weeks) after infection, with 3-5 years of clinical follow-up. Sequencing effort was intended to obtain about 20 sequences from each of 14 samples. It is common for SGA from homogeneous infections to yield multiple identical sequences, all of which were kept. A naming convention for Env sequences was used to ensure consistency and so sample time-point labels could be parsed from sequence names. To study variant dynamics, the number of elapsed days after the earliest sample from sample dates was computed, and the number of days post-infection estimated from the earliest sample was added. For homogeneous infections sampled before the onset of immune selection, a simple Poisson model of random sequence evolution provides the estimate [5, 6].

[0234] The HXB2 reference sequence was added to facilitate numbering positions, the sequences were codon-aligned, then translated, and a phylogeny was inferred. Because no algorithm aligns the HIV envelope perfectly, particularly when a translation is needed, manual alignment was started after preliminary alignment with an HIV-specific hidden Markov model. Aligning all but the hypervariable loops is trivial given such a preliminary alignment. Because hypervariable loops evolve rapidly by tandem duplications, a useful alignment criterion is self-consistency, rather than identification of homologous sites. For example, a putative N-linked glycosylation motif could be placed at either the N- or C-terminal position of an otherwise gapped region. Uniform placement of such motifs, particularly where HXB2 has no corresponding sites, facilitates analysis because the variants appear more clearly as evolutionary signal if aligned consistently.

[0235] Maximum-likelihood trees were inferred from translated amino-acid sequences with PhyML v3 and the HIVw (HIV-specific, within-host) substitution model [64-66]. The phylogeny is used to order sequences and is an organizing principle for sequence evolution from the ancestral TF virus. To identify potential N-linked glycosylation (PNG) sites, PNG sites were annotated by replacing asparagine sites that match the Nx[ST] motif to become Ox[ST]. In the PNG motif, x indicates any amino acid except proline, and the third position is either serine or threonine. For each aligned site, TF loss per time-point sequenced was computed, the maximum identified, and this peak TF loss was compared with a threshold. The threshold was adjusted and the resulting number of sites was considered. This gave a list of sites, which were considered as interesting evolutionary “hot spots” to be represented by a swarm of Envs.

[0236] Swarm Selection

[0237] Having used the TF-loss criterion to select sites from the alignment, a set of Envs was identified to represent the variants that occur at these sites. By simple combinatoric calculations, there are at least 10¹⁰⁰ distinct ways to choose k representatives from n individuals for n above 427 and k over 100. On the scale of the current example, choosing 50 representatives from 385 candidates gives over 10⁶³ distinct alternatives. To search such a vast space of possible solutions is intractable for even the fastest computers. Worse, in the regime of interest, the number of possible solutions grows exponentially with n or k, where k<<n/2.

[0238] A simple, efficient algorithm was designed and implemented to select sequences that represent variants at sites selected by TF loss. The approach is greedy, meaning it adds variants iteratively, rather than refine the entire set for potentially better solutions. Such a greedy approach is unlikely to give the best possible overall solution, but can efficiently provide reasonably good solutions, and can be refined to include other criteria as needed. It works from the same alignment used to select sites, and assumes that the TF form and sample time-points can be identified from sequence names. A virtue of the greedy approach is that it considers time of sampling, and starts with sequences most like the form that established the infection, then progressively builds diversity in a manner that follows the natural course of infection. In this way, common mutations and mutations that eventually go to fixation are sampled many times.

[0239] As outlined in FIG. 17, the swarm selection algorithm selects sets of sequence variants that recapitulate viral evolution in key residues from a table of the amino acid variants found at each selected site. This table of variant counts is used to monitor which remaining mutations need to be included in the swarm set. Variants that only ever appear once, or some other number of times specified by the minimum variant count, are disregarded. Candidates for Env selection must be functionally viable, by lacking long deletions (as specified by the operator of the algorithm) and premature stop codons or incomplete codons, which typically result from frame-shift mutations. Then, starting with the TF form, the procedure iterates chronologically over time-points sampled, and identifies an Env to represent each needed variant at each of the selected sites, should such a variant be present.

[0240] Within a time-point, the choice among multiple Envs that carry a needed variant is resolved by a series of criteria. The algorithm first tries to identify the sequence that uniquely minimizes the distance (number of mutations, including gaps) to the TF among selected sites. Then, in case of ties, a sequence is chosen that minimizes distance to the full-length TF. Finally, if ties remain, a sequence is chosen that minimizes the average distance to the current working set of sequences.

[0241] The sequence selected to represent the needed mutation is included in the swarm set, the corresponding counts in the table of needed mutations are set to zero, and iteration continues. An option exists to require that specific sequences be included, if desired. Such a sequence is added during iteration, to ensure inclusion of earlier forms that carry variants found on the specified sequence, rather than beforehand. Upon iterating over all sample time-points, selected variants, and needed sites, the swarm is complete. This approach is deterministic for a given set of sequences, though unresolved ties may exist among alternative sequences for some data. (This situation, in practice, has yet to be encountered.) Any remaining ties would indicate a need for additional selection criteria, though this outcome is yet to be encountered. An advantage of this approach is that it selects only as many sequence as are necessary to represent the mutational variants in selected sites, rather than some arbitrary number. However, the greedy approach errs towards inclusion of early point mutations that could be included with later, more divergent, viruses.

[0242] The software tools for swarm selection were written as an R package called swarmtools. Example data from CH505 and a tutorial “vignette” are included. Phylogenetic trees have been paired, the TF virus has been rooted on, ladderized, and then rendered as phylograms, together with pixel plots (derived from Highlighter plots [5]), which illustrate polymorphisms as either mutations or insertions/deletions relative to the TF sequence. These have been found to be informative representations for understanding evolution of the virus population in an acutely infected host, given the limited genetic diversity that occurs in early infections [15, 45]. Renderings such as in FIG. 19 emphasize sites with evolutionary changes that produce the branching patterns in the tree, and enable detection of recombinant clades or evolutionary associations with phenotypic assays. The code that was used to make such renderings is available in an R package called pixgram, which uses ape to draw trees [67].

### REFERENCES

[0243] 1. Plotkin S A. Correlates of vaccine-induced immunity. Clin Infect Dis. 2008; 47:401-9. doi: 10.1086/589862.
[0244] 2. Mascola J M, Montefiori D M. The role of antibodies in HIV vaccines. Annu Rev Immunol. 2010; 28:413-44. doi: 10.1146/annurev-immunol-030409-101256
[0245] 3. Mascola J R, Lewis M G, Stiegler G, Harris D, VanCott T C, Hayes D, et al. Protection of Macaques against pathogenic simian/human immunodeficiency virus 89.6PD by passive transfer of neutralizing antibodies. J Virol. 1999; 73(5):4009-18. PubMed PMID: 10196297; PubMed Central PMCID: PMC104180.
[0246] 4. Moldt B, Rakasz E G, Schultz N, Chan-Hui P Y, Swiderek K, Weisgrau K L, et al. Highly potent HIV-specific antibody neutralization in vitro translates into effective protection against mucosal SHIV challenge in vivo. Proceedings of the National Academy of Sciences of the United States of America. 2012; 109(46):18921-5. doi: 10.1073/pnas.1214785109. PubMed PMID: 23100539; PubMed Central PMCID: PMC3503218.
[0247] 5. Keele B, Giorgi E, Salazar-Gonzalez J, Decker J, Pham K, Salazar M, et al. Identification and characterization of transmitted and early founder virus envelopes in primary HIV-1 infection. Proc Natl Acad Sci USA. 2008;105:7552-7.
[0248] 6. Giorgi E, Funkhouser B, Athreya G, Perelson A, Korber B, Bhattacharya T. Estimating time since infection in early homogeneous HIV-1 samples using a Poisson model. BMC Bioinformatics. 2010;11:532.
[0249] 7. Mellors J W, Rinaldo C R, Jr., Gupta P, White R M, Todd J A, Kingsley L A. Prognosis in HIV-1 infection predicted by the quantity of virus in plasma. Science. 1996; 272(5265):1167-70. PubMed PMID: 8638160.
[0250] 8. Mackelprang R D, Carrington M, Thomas K K, Hughes J P, Baeten J M, Wald A, et al. Host genetic and viral determinants of HIV-1 RNA set point among HIV-1 seroconverters from sub-Saharan Africa. J Virol. 2015; 89(4):2104-11. doi: 10.1128/JVI.01573-14. PubMed PMID: 25473042.
[0251] 9. Wolinsky S M, Korber B T, Neumann A U, Daniels M, Kunstman K J, Whetsell A J, et al. Adaptive evolution of human immunodeficiency virus-type 1 during the natural course of infection. Science. 1996; 272(5261):537-42. PubMed PMID: 8614801.
[0252] 10. Weiss R, Clapham P, Weber J, Dalgleish A, Lasky L, Berman P. Variable and conserved neutralization antigens of human immunodeficiency virus. Nature. 1986; 324(6097):572-5.
[0253] 11. Richman D D, Wrin T, Little S J, Petropoulos C J. Rapid evolution of the neutralizing antibody response to HIV type 1 infection. Proc Natl Acad Sci USA. 2002; 100(7):4144-9. doi: doi: 10.1073/pnas.0630530100.
[0254] 12. Wei X, Decker J M, Wang S, Hui H, Kappes J C, Wu X, et al. Antibody neutralization and escape by HIV-1. Nature. 2003; 422:307-12. doi: doi:10.1038/nature01470.
[0255] 13. Scheid J F, Mouquet H, Feldhahn N, Seaman M S, Velinzon K, al e. Broad diversity of neutralizing antibodies isolated from memory B cells in HIV-infected individuals. Nature. 2009; 458:636-40. doi: doi:10.1038/nature07930.
[0256] 14. Bar K J, Tsao C-y, Iyer S S, Decker J M, Yang Y, Bonsignori M, et al. Early low-titer neutralizing antibodies impede HIV-1 replication and select for virus escape. PLoS Pathog. 2012; 8(5):e1002721. doi: 10.1371/journal.ppat.1002721.
[0257] 15. Liao H X, Lynch R, Zhou T, Gao F, Alam S M, Boyd S D, et al. Co-evolution of a broadly neutralizing HIV-1 antibody and founder virus. Nature. 2013; 496(7446):469-76. doi: 10.1038/nature12053. PubMed PMID: 23552890; PubMed Central PMCID: PMC3637846.
[0258] 16. Gao F, Bonsignori M, Liao H X, Kumar A, Xia S M, Lu X, et al. Cooperation of B cell lineages in induction of HIV-1-broadly neutralizing antibodies. Cell. 2014; 158(3):481-91. doi: 10.1016/j.ce11.2014.06.022. PubMed PMID: 25065977; PubMed Central PMCID: PMC4150607.
[0259] 17. Hraber P, Seaman M S, Bailer R T, Mascola J R, Montefiori D C, Korber B T. Prevalence of broadly neutralizing antibody responses during chronic HIV-1 infection. Aids. 2014; 28(2):163-9. doi: 10.1097/QAD.0000000000000106. PubMed PMID: 24361678; PubMed Central PMCID: PMC4042313.
[0260] 18. Doria-Rose N A, Schramm C A, Gorman J, Moore P L, Bhiman J N, DeKosky B J, et al. Developmental pathway for potent V1V2-directed HIV-neutralizing antibodies. Nature. 2014; 509(7498):55-62. doi: 10.1038/nature13036.
[0261] 19. Goonetilleke N, Liu M, Salazar-Gonzalez J, Ferrari G, Giorgi E, Ganusov V, et al. The first T cell response to transmitted/founder virus contributes to the control of acute viremia in HIV-1 infection. J Exp Med. 2009; 206:1253-72.
[0262] 20. Fischer W, Ganusov V V, Giorgi E E, Hraber P T, Keele B F, Leitner T, et al. Transmission of single HIV-1 genomes and dynamics of early immune escape revealed by ultra-deep sequencing. PLoS ONE. 2010; 5(8):e12303. doi: 10.1371/journal.pone.0012303. PubMed PMID: 20808830; PubMed Central PMCID: PMC2924888.
[0263] 21. Liu M K, Hawkins N, Ritchie A J, Ganusov V V, Whale V, Brackenridge S, et al. Vertical T cell immunodominance and epitope entropy determine HIV-1 escape. The Journal of clinical investigation. 2013; 123(1):380-93. doi: 10.1172/JCI65330. PubMed PMID: 23221345; PubMed Central PMCID: PMC3533301.
[0264] 22. Edwards C T, Holmes E C, Pybus O G, Wilson D J, Viscidi R P, Abrams E J, et al. Evolution of the human immunodeficiency virus envelope gene is dominated by purifying selection. Genetics. 2006; 174(3):1441-53. doi: 10.1534/genetics.105.052019. PubMed PMID: 16951087; PubMed Central PMCID: PMC1667091.
[0265] 23. Walker L M, Phogat S K, Chan-Hui P Y, Wagner D, Phung P, Goss J L, et al. Broad and potent neutralizing antibodies from an African donor reveal a new HIV-1 vaccine target. Science. 2009; 326(5950):285-9. doi: 10.1126/science.1178746. PubMed PMID: 19729618; PubMed Central PMCID: PMC3335270.
[0266] 24. Wu X, Yang Z Y, Li Y, Hogerkorp C M, Schief W R, Seaman M S, et al. Rational design of envelope identifies broadly neutralizing human monoclonal antibodies to HIV-1. Science. 2010; 329(5993):856-61. doi: 10.1126/science.1187659. PubMed PMID: 20616233; PubMed Central PMCID: PMC2965066.
[0267] 25. Walker L M, Huber M, Doores K J, Falkowska E, Pejchal R, Julien J P, et al. Broad neutralization coverage of HIV by multiple highly potent antibodies. Nature. 2011; 477(7365):466-70. doi: 10.1038/nature10373. PubMed PMID: 21849977; PubMed Central PMCID: PMC3393110.
[0268] 26. Scheid J F, Mouquet H, Ueberheide B, Diskin R, Klein F, Oliveira T Y, et al. Sequence and structural convergence of broad and potent HIV antibodies that mimic CD4 binding. Science. 2011; 333(6049):1633-7. doi: 10.1126/science.1207227. PubMed PMID: 21764753; PubMed Central PMCID: PMC3351836.
[0269] 27. Kepler T B. Reconstructing a B-cell clonal lineage. I. Statistical inference of unobserved ancestors. F1000Research. 2013; 2:103. doi: 10.12688/f1000research.2-103.v1. PubMed PMID: 24555054; PubMed Central PMCID: PMC3901458.
[0270] 28. Kepler T B, Munshaw S, Wiehe K, Zhang R, Yu J S, Woods C W, et al. Reconstructing a B-cell clonal lineage. II. Mutation, selection, and affinity maturation. Frontiers in immunology. 2014; 5:170. doi: 10.3389/fimmu.2014.00170. PubMed PMID: 24795717; PubMed Central PMCID: PMC4001017.
[0271] 29. Wibmer C K, Bhiman J N, Grey E S, Tumba N, Abdool Karim S S, al e. Viral escape from HIV-1 neutralizing antibodies drives increased plasma neutralization breadth through sequential recognition of multiple epitopes and immunotypes. PLoS Pathog. 2013; 9(10):e1003738. doi: 10.1371/journal.ppat.1003738
[0272] 30. Haynes B F, McElrath M J. Progress in HIV-1 vaccine development. Curr Opin HIV AIDS. 2013; 8(4):326-32. doi: 10:1097/COH.0b013e328361d178.
[0273] 31. Haynes B F, Moody M A, Alam S M, Bonsignori M, Verkoczy L, al e. Progress in HIV-1 vaccine development. J Allergy Clin Immunol. 2014; 134:3-10. doi: 10.1016/j jaci.2014.04.025.
[0274] 32. Tomaras G D, Haynes B F. HIV-1-specific antibody responses during acute and chronic HIV-1 infection. Curr Opin HIV AIDS. 2009; 4(5):373-9. doi: 10.1097/COH.0b013e32832f00c0.
[0275] 33. Haynes B F, Kelsoe G, Harrison S C, Kepler T B. B-cell—lineage immunogen design in vaccine development with HIV-1 as a case study. Nature Biotechnol. 2012; 30:423-33. doi: 10.1038/nbt.2197.
[0276] 34. Zhou T, Zhu J, Wu X, Moquin S, Zhang B, al e. Multidonor analysis reveals structural elements, genetic determinants, and maturation pathway for HIV-1 neutralization by VRC01-class antibodies. Immunity. 2013; 39(2):245-58. doi: 10.1016/j.immuni.2013.04.012.
[0277] 35. Bonsignori M, Hwang K K, Chen X, Tsao C Y, Morris L, al e. Analysis of a clonal lineage of HIV-1 envelope V2/V3 conformational epitope-specific broadly neutralizing antibodies and their inferred unmutated common ancestors. J Virol. 2011; 85(19):9998-10009. doi: 10.1128/JVI.05045-11.
[0278] 36. Kwong P D, Mascola J R. Human antibodies that neutralize HIV: identification, structures, and B cell ontogenies. Immunity. 2012; 37:412-25.
[0279] 37. Mascola J M, Haynes B F. HIV-1 neutralizing antibodies: understanding nature's pathways. Immunol Rev 2013; 254:225-44.
[0280] 38. Malherbe D C, Doria-Rose N A, Misher L, Beckett T, Puryear W B, al e. Sequential immunization with a subtype B HIV-1 envelope quasispecies partially mimics the in vivo development of neutralizing antibodies. J Virol. 2011; 85:5262-74. doi: 10.1128/JVI.02419-10.
[0281] 39. Pissani F, Malherbe D C, Robins H, DeFilippis V R, Park B, al e. Motif-optimized sutype A HIV envelope-based DNA vaccines rapidly elicit neutralizing antibodies when delivered sequentially. Vaccine. 2012; 30:5519-26. doi: 10.1016/j.vaccine.2012.06.042.
[0282] 40. Salazar-Gonzalez J F, Bailes E, Pham K T, Salazar M G, Guffey M B, Keele B F, et al. Deciphering human immunodeficiency virus type 1 transmission and early envelope diversification by single-genome amplification and sequencing. J Virol. 2008; 82(8):3952-70. doi: 10.1128/JVI.02660-07. PubMed PMID: 18256145; PubMed Central PMCID: PMC2293010.
[0283] 41. Salazar-Gonzalez J, Salazar M, Keele B, Learn G, Giorgi E, Li H, et al. Genetic identity, biological phenotype, and evolutionary pathways of transmitted/founder viruses in acute and early HIV-1 infection. J Exp Med. 2009; 206:1273-89.
[0284] 42. Ganusov V, Goonetilleke N, Liu M, Ferrari G, Shaw G, McMichael A, et al. Fitness costs and diversity of CTL response determine the rate of CTL escape during the acute and chronic phases of HIV infection. J Virol. 2011; 85(20):10518-28.
[0285] 43. Batorsky R, Sergeev R A, Rouzine I M. The route of HIV escape from immune response targeting multiple sites is determined by the cost-benefit tradeoff of escape mutations. PLoS Comput Biol. 2014; 10(10):e1003878. doi: 10.1371/journal.pcbi.1003878.
[0286] 44. Huang W, Haubold B, Hauert C, Traulsen A. Emergence of stable polymorphisms driven by evolutionary games between mutants. Nature communications. 2012; 3:919. doi: 10.1038/ncomms1930. PubMed PMID: 22735447; PubMed Central PMCID: PMC3621454.
[0287] 45. Moody M A, Gao F, Gurley T C, Amos J D, Kumar A, al e. HIV neutralizing antibodies without heterologous breadth can potently neutralize autologous viruses. submitted.
[0288] 46. Pancera M, Zhou T, Druz A, Georgiev I S, Soto C, Gorman J, et al. Structure and immune recognition of trimeric pre-fusion HIV-1 Env. Nature. 2014;514(7523):455-61. doi: 10.1038/nature13808. PubMed PMID: 25296255.
[0289] 47. Wu X, Zhou T, Zhu J, Zhang B, Georgiev I, Wang C, et al. Focused evolution of HIV-1 neutralizing antibodies revealed by structures and deep sequencing. Science. 2011; 333(6049):1593-602. doi: 10.1126/science.1207532. PubMed PMID: 21835983; PubMed Central PMCID: PMC3516815.
[0290] 48. Zhou T, Georgiev I, Wu X, Yang Z Y, Dai K, Finzi A, et al. Structural basis for broad and potent neutralization of HIV-1 by antibody VRC01. Science. 2010; 329(5993):811-7. doi: 10.1126/science.1192819. PubMed PMID: 20616231; PubMed Central PMCID: PMC2981354.
[0291] 49. Diskin R, Scheid J F, Marcovecchio P M, West A P, Jr., Klein F, Gao H, et al. Increasing the potency and breadth of an HIV antibody by using structure-based rational design. Science. 2011; 334(6060):1289-93. doi: 10.1126/science.1213782. PubMed PMID: 22033520; PubMed Central PMCID: PMC3232316.
[0292] 50. Zhou T, Xu L, Dey B, Hessell A J, Van Ryk D, Xiang S H, et al. Structural definition of a conserved neutralization epitope on HIV-1 gp120. Nature. 2007;445(7129):732-7. doi: 10.1038/nature05580. PubMed PMID: 17301785; PubMed Central PMCID: PMC2584968.
[0293] 51. West A P, Scharf L, Horwitz J, Klein F, Nussenzweig M C, Bjorkman P J. Computational analysis of anti-HIV-1 antibody neutralization panel data to identify potential functional epitope residues. Proceedings of the National Academy of Sciences of the United States of America. 2013; 110(26):10598-603. doi: 10.1073/pnas.1309215110. PubMed PMID: 23754383; PubMed Central PMCID: PMC3696754.
[0294] 52. Crooks G E, Hon G, Chandonia J M, Brenner S E. WebLogo: a sequence logo generator. Genome research. 2004; 14(6):1188-90. doi: 10.1101/gr.849004. PubMed PMID: 15173120; PubMed Central PMCID: PMC419797.
[0295] 53. Schneider T D, Stephens R M. Sequence logos: a new way to display consensus sequences. Nucleic Acids Res. 1990; 18(20):6097-100. PubMed PMID: 2172928; PubMed Central PMCID: PMC332411.
[0296] 54. Kaufman L, Rousseew P J. Finding groups in data: An introduction to cluster analysis. Hoboken: John Wiley and Sons; 2005.
[0297] 55. Murrell B, Wertheim J O, Moola S, Weighill T, Scheffler K, al e. Detecting individual sites subject to episodic diversifying selection. PLoS Genet 2012; 8(7):e1002764. doi: 10.1371/journal.pgen.1002764.
[0298] 56. Pennings P S, Kryazhimskiy S, Wakeley J. Loss and recovery of genetic diversity in adapting populations of HIV. PLoS Genet. 2014; 10(1):e1004000. doi: 10.1371/journal.pgen.1004000.
[0299] 57. Maher S J, Murray J M. The unrooted set covering connected subgraph problem differentiating between HIV envelope sequences. submitted.
[0300] 58. Murray J M, Moenne-Loccoz R, Velay A, Habersetzer F, Doffol M, et al. Genotype 1 hepatitis C virus envelope features that determine antiviral response assessed through optimal covariance networks. PLoS ONE. 2013; 8(6):e67254. doi: 10.1371/journal.pone.0067254.
[0301] 59. Korber B, Gnanakaran S. The implications of patterns in HIV diversity for neutralizing antibody induction and susceptibility. Curr Opin HIV AIDS. 2009; 4:408-17. doi: 10.1097/COH.0b013e32832f129e.
[0302] 60. Sather D N, Carbonetti S, Malherbe D, Pissani F, Stuart A B, Hessell A J, et al. Emergence of broadly neutralizing antibodies and viral co-evolution in two subjects during the early stages of infection with human immunodeficiency virus type 1. J Virol. 2014; 88(22):12968-81. doi: 10.1128/JVI.01816-14.
[0303] 61. Wang S, Mata-Fink J, Kriegsman B, Hanson M, Irvine D J, Eisen H N, et al. Manipulating the selection forces during affinity maturation to generate cross-reactive HIV antibodies. Cell. 2015; 160(4):785-97. doi: 10.1016/j.ce11.2015.01.027. PubMed PMID: 25662010.
[0304] 62. Mcllroy D, Barteau B, Cany J, Richard P, Gourden C, al e. DNA/Amphiphilic block co-polymer nanospheres promote low-dose DNA vaccination. Mol Ther. 2009; 17(8):1473-81. doi: 10.1038/mt.2009.84.
[0305] 63. Chèvre R, Le Bihan O, Beilvert F, Chatin B, Barteau B, Mével M, et al. Amphiphilic block copolymers enhance the cellular uptake of DNA molecules through a facilitated plasma membrane transport. Nucleic Acids Res. 2011; 39(4):1610-22. doi: 10.1093/nar/gkq922.
[0306] 64. Guindon S, Gascuel O. A simple, fast, and accurate algorithm to estimate large phylogenies by maximum likelihood. Syst Biol. 2003; 52(5):696-704.
[0307] 65. Guindon S, Dufayard J F, Lefort V, Anisimova M, Hordijk W, Gascuel O. New algorithms and methods to estimate maximum-likelihood phylogenies: assessing the performance of PhyML 3.0. Syst Biol. 2010; 59:307-21.
[0308] 66. Nickle D C, Heath L, Jensen M A, Gilbert P B, Mullins J I, Kosakovsky-Pond S L. HIV-specific probabilistic models of protein evolution. PLoS ONE. 2007; 2:e503.
[0309] 67. Paradis E, Claude J, Strimmer K. APE: analyses of phylogenetics and evolution in R language. Bioinformatics. 2004; 20:289-90.

### Example 8

[0310] Example 8 describes a method for swarm immunogen selection.

[0311] Neutralization breadths are uniformly distributed across chronic sera. This suggests anyone, not only 10-20%, might develop broadly neutralizing antibodies (bnAbs) if exposed to immunogens via vaccination. Working back from mature bnAbs through intermediates has enabled understanding their development from the unmutated germ-line ancestor, and showed that viral genetic diversity preceded the development of neutralization breadth. Described herein is the selection of sets of viral variants to investigate the role of antigenic diversity in serial samples. It is hypothesized that sites losing the ancestral, transmitted-founder (TF) virus state are most likely under positive selection, not drift. From acute, homogenous infections with 3-5 years of follow-up, sites of interest among plasma SGA Envs were identified by comparing the frequency of sequences per time-point having the TF state with a threshold, typically 5%. Sites with TF frequencies below threshold are putative escapes. Additional sites of interest were considered where more information was available, i.e. tree-corrected neutralization signatures and antibody contacts determined from co-crystal structure. Progressive loss of the TF form was used to identify clones carrying representative escape mutations.

[0312] In CH505, a study participant with an early antibody that bound autologous TF virus, 398 Envs from 14 time-points over three years were studied (median per sample: 25, range: 18-53). 36 sites with TF frequencies below 20% were found in any sample. Neutralization and structure data identified 28 and 22 interesting sites, respectively. Together, this identified six gp41 and 53 gp120 sites, plus six V1 or V5 insertions not in HXB2. 100 clones that represent the sites of interest were selected. Selected clones had a lower clustering coefficient and greater diversity in selected sites than sets sampled randomly. This approach was developed to select reagents for neutralization assays, then study affinity maturation, autologous neutralization, and the transition to heterologous neutralization and breadth. Specific implications for vaccine design, given sustained coevolution of immunity and escape is described herein.

[0313] Introduction

[0314] Neutralizing antibodies are immune correlates of protection in all licensed antiviral vaccines. It is not yet known how to induce broadly cross-reactive neutralizing antibodies (bnAbs) against HIV-1 via vaccination. Variation among proteins that interact directly with antibodies provides evolutionary signal about the effects of immune selection. Motivated by previous findings that early virus diversification drives neutralization breadth in early infection with HIV-1, it was hypothesized that progressively increasing antigen diversity can induce bnAbs. Herein immunogens with progressively increasing diversity at key sites in polymorphic viral proteins are identified. A major innovation of the swarm vaccine concept is rapid turnaround from viral sequence information to immunogen candidates. Another novel aspect is its potential for general utility to promote bnAb development against highly variable viruses, bacteria, and secreted toxins.

[0315] Neutralizing antibodies (nAbs) block viruses from entering cells.

[0316] All chronic plasmas neutralize some HIV-1 Envs; half neutralize at least 50% of diverse viruses. Virus Envelope diversity and ongoing immune escape drive selection for greater breadth Divergence, bNAb breadth/potencyEnv diversity precedes Nab breadth.

[0317] Typical course in natural infection: Autologous Nabs, followed by selection for relative Env resistance, then selection of bNAbs that tolerate the Env variants.

[0318] About 80% of new infections are established by single transmitted/founder (TF) virions that diversify randomly until immune selection becomes active.

[0319] Longitudinal samples from acute infection through 3-5 years of follow-up enable following bnAb development.

[0320] Single-genome sequencing of virus envelopes yields high-quality sequence data.

[0321] Diverse swarms of viral variants that induced breadth in bnAb donor were selected.

[0322] Related work in vaccine design has suggested that Env variants sampled during development of heterologous neutralization breadth could be administered as immunogens. Diversity among such Envs are hypothesized to emulate immune selection and induce antibodies with more varied specificities than single, clonal immunogens.

[0323] In other related research, Env selection has been formally represented as a set-coverage problem. That work identifies networks of covarying sites that occur in a population-level alignment, which represents a particular clade, subtype, or (in the case of hepatitis C virus) genotype. It considers the difference between early, transmissible, transmitted-founder viruses from later, chronic viruses, and utilizes only covarying sites found to occur in the TF stage. Though the underlying vaccine concept in that line of inquiry differs from that used herein, the formalism is related to the problem approach described herein.

[0324] Sequence alone: Using evidence for selection as measured by TF loss, once sequences are obtained, a swarm vaccine can be designed.

[0325] Contacts: requires antibody/Env structure, or an analog antibody with a known structure.

[0326] Signatures: correlations of mutations with bNAb sensitivity can be identified—identify sites of interest both inside and outside of contacts.

[0327] A simple indicator of immune selection in viral proteins was developed to identify immunogens that represent diversity induced during development of broadly neutralizing antibodies. A simple, efficient algorithm was designed and implemented to select sequences that represent the accumulation of mutations involved in immune recognition for a vaccine sequence cocktail or reagent set. By factoring in time of sampling, the algorithm starts with sequences nearest the form that established the infection, and progressively builds on diversity in a manner that parallels natural infection, so common mutations and mutations that eventually go to fixation are naturally sampled many times. It is deterministic for a given input set. However, unresolved ties may exist among alternative clones for some data.

[0328] Results

[0329] Site Selection

[0330] 398 clones from 14 time-points over three years were aligned (median per sample: 25, range: 18-53) across 953 Env sites. TF loss per site was computed for each of 14 sample timepoints, weeks 4 through 160 (FIG. 27). Peak TF loss is the greatest TF loss per site over all timepoints sampled. The cumulative distribution of peak TF loss per site indicates a third of sites are invariant and 64 sites lose over 50% TF (FIG. 26). From this distribution, 36 sites with at least 80% peak TF loss were selected for further study (FIG. 33). These sites are putative escapes from immune selection, though their TF loss might be very slow or revert below threshold. Initially dominated by the TF form, variants emerge over time, with a variety of resulting dynamics across sites (FIG. 27). Reordering sites by when the TF first becomes minority, resolving ties with cumulative TF loss (FIG. 33), the progression of putative escapes is apparent (FIG. 29). Further, sites with 80% TF loss form localized clusters on the outer domain of gp120. The clustered patches on gp120 correspond to known antibody specificities. Two clusters are localized near the CD4 and CCRS binding sites, which correspond to the CH103 bnAb epitope (Liao H-X, Lynch R, Zhou T, Gao F, Alam S M, et al. (2013) Coevolution of a broadly neutralizing HIV-1 antibody and founder virus. Nature 496: 469-476. doi: 10.1038/nature12053). One cluster is localized to light-chain contacts and another to heavy-chain contacts. A third cluster, localized at the base of the V3 loop, corresponds to the epitope of DH151 and DH228. Three of the 36 sites appear on gp41 (620, 640, and 756; not shown).

[0331] Clone Selection

[0332] The selected sites were extracted from aligned sequences and concatenated to review Env variation among candidate clones. This representation as concatamers (sequences formed by concatenating selected sites) formed the basis for clone selection. The greedy swarm-selection algorithm (FIG. 30) identified 57 clones that cover variant diversity at 36 selected sites (FIG. 34). None of the concatamers from the selected clones are duplicates, which is unlikely to occur when choosing clones randomly (FIG. 31). The selected clones also have a lower clustering coefficient than sets of randomly selected clones (FIG. 31). The lower clustering coefficient indicates less hierarchical structure among subsets of concatamers from the selected clones (Kaufman L, Rousseew P J (2005) Finding groups in data: An introduction to cluster analysis. Hoboken: John Wiley and Sons. 342).

[0333] Discussion

[0334] Because sites are not independent, but covary, information about site covariation could facilitate smaller swarm sets that represent selected sites. Other optimization algorithms are likely to yield smaller swarms, for the small cost of more computing time.

[0335] Experimental validation as immunogens will be carried out.

[0336] A strategy to identify candidates for Env sites under immune selection from longitudinally sampled sequences was developed. In CH505, two thirds of these selected sites were ultimately related to the CH103 bNAb lineages, by either signature analysis or structural contacts proximity. Whether this information can guide selection of vaccine antigen sets that recapitulate the evolutionary pressure imposed by Env antigenic diversity on bNAb lineages is being explored. In some embodiments, gradual accumulation of epitope diversity may be key.

[0337] Methods

[0338] Site Selection

[0339] Transmitted-founder (TF) loss is the proportion of sequences sampled per time-point that have lost the ancestral TF state. This is an efficient way to select rapidly evolving sites. Herein, no other information than TF loss was considered, though such information could be used to select sites. This could include signature sites associated with neutralization assay outcomes and antibody contact residues from structural data, if available.

[0340] The starting point was SGA env (DNA) sequences, from a minimum of roughly 20 clones sampled longitudinally, beginning early (3-6 weeks) after infection, with 3-5 years of clinical follow-up. It is common for SGA from homogeneous infections to yield multiple identical sequences, all of which were kept. A naming convention for clones was used to ensure consistency and so sample time-point labels could be parsed from sequence names. To study variant dynamics, the number of elapsed days after the earliest sample from sample dates was computed, and the number of days post-infection estimated from the earliest sample was added. For homogeneous infections sampled before the onset of immune selection, a simple model of sequence evolution provides the estimate (Keele B F, Giorgi E E, Salazar-Gonzalez J F, Decker J M, Pham K T, et al. (2008) Identification and characterization of transmitted and early founder virus envelopes in primary HIV-1 infection. Proc Natl Acad Sci (USA) 105: 7552-7557; Giorgi E E, Funkhouser B, Athreya G, Perelson A S, Korber B T, Bhattacharya T (2010) Estimating time since infection in early homogeneous HIV-1 samples using a Poisson model. BMC Bioinformatics 11: 532. doi: 10.1186/1471-2105-11-532).

[0341] The HXB2 reference sequence was added to facilitate numbering positions, codon-aligned the sequences, translated them, and inferred a phylogeny. Though no algorithm aligns the HIV envelope perfectly, a useful starting point for manual alignment uses an HIV-specific hidden Markov model [GeneCutter]. Aligning all but the hypervariable loops is trivial given such a preliminary alignment. Because hypervariable loops evolve rapidly by tandem duplications, a useful alignment criterion is self-consistency, rather than identification of homologous sites. For example, a putative N-linked glycosylation motif could be placed at either the N- or C-terminal position of an otherwise gapped region. Uniform placement of such motifs, particularly where HXB2 has no corresponding sites, facilitates analysis because the variants appear more clearly as evolutionary signal if aligned consistently.

[0342] Maximum-likelihood trees were inferred from translated amino-acid sequences with PhyML and the HIVw (HIV-specific, within-host) substitution model. The phylogeny is used to order sequences and is an organizing principle for sequence evolution from the ancestral TF virus.

[0343] To identify potential N-linked glycosylation (PNG) sites, PNG sites were annotated by replacing asparagine sites that match the Nx[ST] motif to become Ox[ST]. (In the PNG motif, x indicates any amino acid except proline, and the third position is either serine or threonine).

[0344] For each aligned site, TF loss was computed per time-point sequenced, the maximum was identified, and this “peak” TF loss was compared with a threshold. The TF loss threshold determines the number of sites that are selected; a high TF loss threshold yields fewer sites than a low threshold. The threshold will depend on many variables, such as number of sequences sampled and time since infection. The threshold was adjusted and the resulting number of sites considered. This gave a list of sites in the alignment, which was considered as interesting evolutionary “hot spots” to be represented by a swarm of clones.

[0345] Clone Selection

[0346] Having used the TF-loss criterion to select sites from the alignment, a set of clones was identified to represent the variants that occur at these sites. Choosing k representatives from n clones gives at least 10¹⁰⁰ possibilities for n above 427 and k over 100. On the scale of the current example, choosing 50 clones from 250 candidates gives over 10⁵³ alternatives. To search such a vast space of possible solutions is intractable for even the fastest computers.

[0347] A simple, efficient algorithm was designed and implemented to select sequences to represent variants at sites selected by TF loss. The approach is greedy in that it adds clones iteratively, rather than refine the entire clone set for potentially better solutions. Such a greedy approach is unlikely to give the best possible solution, but can efficiently provide reasonably good solutions, and can be refined to include other criteria as needed. It works from the same alignment used to select sites, and assumes that the TF form and sample timepoints can be identified from clone names.

[0348] Clone selection works by initially tabulating amino acid variants among selected sites. This table of variant counts is used to monitor which remaining mutations need to be included in the swarm set. Variants that only ever appear once are disregarded. Candidates for clone selection must be functionally viable, by lacking long deletions and premature stop codons or incomplete codons, which typically result from frame-shift mutations. Starting with the TF form, the procedure iterates chronologically over timepoints sampled, and identifies a clone to represent each needed variant at each of the selected sites, should such a variant be present. The choice among multiple clones that carry a needed variant is resolved by a series of tie-breaking criteria, first to minimize distance (number of mutations, including gaps) to the TF form among selected sites, then for the full-length clone, and finally to minimize average distance to clones in the current swarm set. Any remaining ties would indicate a need for additional selection criteria. The clone selected to represent the needed variant is included in the swarm set, corresponding counts in the table of needed variants are set to zero, and iteration continues. Upon iterating over all sample timepoints, selected variants, and needed sites, the clone set is complete. A benefit of this approach is that it selects only as many clones are necessary to represent the variants in selected sites. However, the greedy approach errs towards inclusion of early point mutations that would be included among later variants.

### REFERENCES

[0349] Pissania F, Malherbe D C, Robins H, DeFilippis V R, Park B, et al. [Sellhorn G, Stamatatos L, Overbaugh J, Haigwood N L] (2012) Motif-optimized subtype A HIV envelope-based DNA vaccines rapidly elicit neutralizing antibodies when delivered sequentially. Vaccine 30: 5519-5526. dx.doi.org/10.1016/j.vaccine.2012.06.042

[0350] Malherbe D C, Doria-Rose N A, Misher L, Beckett T, Puryear W B, et al. [Schuman J T, Kraft Z, O′Malley J, Mori M, Srivastava I, Barnett S, Stamatatos L, Haigwood N L] (2011) Sequential immunization with a subtype B HIV-1 envelope quasispecies partially mimics the in vivo development of neutralizing antibodies. J Virol 85: 5262-5274. doi:10.1128/JVI.02419-10

[0351] Pissani F, D C Malherbe, Schuman J T, Robins H, Park B S, et al. [Krebs S J, Barnett S W, Haigwood N L] (2014) Improvement of antibody responses by HIV envelope DNA and protein co-immunization. Vaccine 32: 507-513. dx.doi.org/10.1016/j.vaccine.2013.11.022

[0352] Giorgi E E, Funkhouser B, Athreya G, Perelson A S, Korber B T, Bhattacharya T (2010) Estimating time since infection in early homogeneous HIV-1 samples using a Poisson model. BMC Bioinformatics 11: 532. doi: 10.1186/1471-2105-11-532

[0353] Haynes B F, Kelsoe G, Harrison S C, Kepler T B (2012) B-cell—lineage immunogen design in vaccine development with HIV-1 as a case study. Nature Biotechnol 30: 423-433. doi: 10.1038/nbt.2197

[0354] Kaufman L, Rousseew P J (2005) Finding groups in data: An introduction to cluster analysis. Hoboken: John Wiley and Sons. 342 p.

[0355] Keele B F, Giorgi E E, Salazar-Gonzalez J F, Decker J M, Pham K T, et al. (2008) Identification and characterization of transmitted and early founder virus envelopes in primary HIV-1 infection. Proc Natl Acad Sci (USA) 105: 7552-7557.

[0356] Kwong P D, Mascola J R, Nabel G J (2013) Broadly neutralizing antibodies and the search for an HIV -1 vaccine: the end of the beginning Nat Rev Immunol 13:693-701.

[0357] Liao H-X, Lynch R, Zhou T, Gao F, Alam S M, et al. (2013) Coevolution of a broadly neutralizing HIV-lantibody and founder virus. Nature 496: 469-476. doi: 10.1038/nature12053

[0358] Corti D, Lanzavecchia A (2013) Broadly neutralizing antiviral antibodies. Annu Rev Immunol 31: 705-742.

[0359] Burton D R, Desrosiers R C, Doms R W, Koff W C, Kwong P D, et al. (2004) HIV vaccine design and the neutralizing antibody problem. Nat Immunol 5: 233-236.

[0360] Burton D R, Ahmed R, Barouch D H, Butera S T, Crotty S, et al. (2012) A Blueprint for HIV vaccine discovery. Cell Host Microbe 12: 396-407. doi: 10.1016/j.chom.2012.09.008

[0361] Klein F, Mouquet H, Dosenovic P, Scheid J F, Scharf L, Nussenzweig M C (2013) Antibodies in HIV-1 vaccine development and therapy. Science 341: 1199-1204.

[0362] Korber B, Gnanakaran S (2009) The implications of patterns in HIV diversity for neutralizing antibody induction and susceptibility. Curr Opin HIV AIDS 4: 408-417. doi: 10.1097/COH.0b013e32832f129e

[0363] Kwong P D, Mascola J R (2012) Human antibodies that neutralize HIV: Identification, structures, and B cell ontogenies. Immunity 37: 412-425.

[0364] McGuire A T, Hoot S, Dreyer A M, Lippy A, Stuart A, et al. (2013) Engineering HIV envelope protein to activate germline B cell receptors of broadly neutralizing anti-CD4 binding site antibodies. J Exp Med 210: 655-633.

[0365] Murray J M, Moenne-Loccoz R, Velay A, Habersetzer F, Doffol M, et al. (2013) Genotype 1 hepatitis C virus envelope features that determine antiviral response assessed through optimal covariance networks. PLoS ONE 8(6): e67254. doi: 10.1371/journal.pone.0067254

### Example 9

[0366] Example 9 describes swarm immunogen concept. Sites are identified by TF loss (FIG. 35), Clones with representative diversity are selected (FIG. 36).

### Example 10

[0367] Example 10 describes swarm selection. Diversity in rapidly evolving sites are sampled as progression of mutations away from TF. Serially sampled sequences are aligned to TF or UA. For site selection, the number of sites selected depends on TF loss cutoff (FIG. 39). The loss of ancestral transmitted-founder (TF) amino acids in Envs from CH505 is shown in FIG. 37. The variant frequency across 35 sites selected from CH505 Env gp160 stratified by time is shown in FIG. 38. In some embodiments, CH505 sites with 80% TF loss formed two clusters on the gp120 outer domain. The outcome of clone selection depends on minimum variant count (FIG. 40).

### Example 11

[0368] Example 11 describes selection procedure. The variants seen are tabulated across all sequences. Rare variants are excluded (<minimum variant count). Variant counts are updated while selecting sequences. For each time point sampled (1 . . . t), for each site selected (1 . . . s), and for each variant not yet included (1 . . . v), select the sequence that can uniquely minimize HD to TF among the selected sites, minimize HD to TF over full length, or minimize mean HD to current swarm. Concatamers from a swarm of 54 env clones that represent selected sites are shown in FIG. 41 and swarm variant frequency from 35 selected sites is shown in FIG. 42. Concatamers from a swarm of 90 env clones that represent selected sites are shown in FIG. 43.

[0369] For CH103 VH, the sites above cutoff versus the non-UA cutoff is plotted in FIG. 44. The variant frequency across 15 V_{H} sites stratified by time is shown in FIG. 45.

[0370] Swarms are sequence sets that represent variant diversity from shared ancestor. Selected sites have highest peak TF loss. An algorithm selects clones that carry all but rare variants. Applications include reagent selection and immunogens for bnAb induction. R packages are in preparation (pixgramr and swarmtools).

### Example 12

[0371] Example 12 describes the structure of antibody CH103 in complex with the outer domain of HIV-1 gp120. Overall structure of the CH103-gp120 complex, with gp120 polypeptide depicted in ribbon and CH103 shown as a molecular surface.

### Example 13

[0372] Example 13 describes the time of appearance and V_{H}DJ_{H} mutations in CH103 clonal family. Maximum likelihood phylogram showing the CH103 lineage with the inferred intermediates (circles, 11-4, 17 and 18), and percentage mutated V_{H} sites and timing indicated. Mutation frequency is 4-17% (FIG. 46).

### Example 14

[0373] Example 14 describes the binding affinity maturation for the CH103 clonal family. Binding affinities (Kd, nM) of antibodies to autologous subtype C CH505 (C.CH505; left box) and heterologous B.63521 (right box) were measured by surface plasmon reasonance (FIG. 47).

### Example 15

[0374] Example 15 describes the development of neutralization breadth in the CH103 clonal lineage. The phylogenetic CH103 clonal lineage tree showing the IC50 (mg ml21) of neutralization of the autologous transmitted/founder (C.CH505), heterologous tier clades A (A.Q842) and B (B.BG1168) viruses as indicated in FIG. 48. There is increasing neutralization potency and breadth (TZM-bl assay).

### Example 16

[0375] Example 16 describes the steps of a B-cell-lineage—based approach to vaccine design (FIG. 49). Step 1 is to isolate VH and VL chain members from the peripheral blood or tissues of patients containing BnAbs and to express these native Ig chain pairs as whole antibodies. Step 2 is to infer intermediate ancestor antibodies (IAs, labeled 1, 2 and 3) and the unmutated ancestor antibody (UA). Step 3 requires producing the unmutated and intermediate ancestors as recombinant mAbs and using structure-based alterations in the antigen (changes in Env constructs predicted to enhance binding to the unmutated or intermediate ancestors) or deriving altered antigens using a suitably designed selection strategy. Vaccine administration might prime with the antigen that binds the unmutated ancestor most tightly, and this is then followed by sequential boosts with antigens optimized for binding to each intermediate ancestor. Shown here is an actual clonal lineage of the V1/V2-directed BnAbs CH01-CH04. Targeting the unmutated ancestor with an immunogen that has enhanced binding may induce higher antibody responses. If high-affinity ligands for unmutated ancestors cannot be found, then high-affinity ligands targeting the intermediate ancestors may be equally useful for triggering a response.f

### Example 17

[0376] Example 17 describes how env diversification precedes breadth. At 6 months, divergence in contact resisues was greatest for CH505 among 17 subjects followed from acute infection. A comparison of the pace of viral sequence evolution in CH505 (indicated here by the 9-digit anonymous study-participant identifier 703010505) in regions relevant to the CH103 epitope with other subjects is shown in FIGS. 50A-50B. The regions of interest include the CH103 contacts defined by the structure in this paper, as well as VRC01 contacts and CD4bs contacts, and the V1 and V5 loops immediately adjacent to these contacts. (FIG. 50A) The distribution of sequence distances expressed as the percentage of amino acids that are different between two sequences, resulting from a pair-wise comparison of all sequences sampled in a given time point. Because these are all homogeneous (single-founder) infection cases, very few mutations appear in the CH103 relevant regions or other sites in the virus during acute infection (left hand panels). By 24 weeks after enrollment (week 30 from infection in (A) 703010505, labeled month 6 here as it is approximate), extensive mutations have begun to accrue, focused in CH103 relevant regions (top middle panel), but not in other regions of Env (bottom middle panel). Subject 703010505 has the highest ranked diversity among 15 subjects (B-Q) sampled in this time frame (p=0.067), indicating a focused selective pressure began unusually early in this subject. By 1 year (month 12 indicates samples taken between 10-14 months from enrollment, due to variation in timing of patient visits), this region has begun to evolve in many individuals, possibly due to autologous NAb responses active later in infection. (FIG. 50B) Phylogenetic trees based on concatenated CH103 relevant regions (HXB2 sites 124-127, 131, 132, 279-283, 364-371, 425-432, 455-465, 471-477) were created with PhyML3.0, using HIVw, a within-subject HIV protein substitution model, which was selected to be the optimum model for these sequences using ProtTest. Indels were treated as an additional character state, rather than as missing information. In this view, the extensive evolution away from the T/F virus by month 6, shown in gold, is particularly striking. Distances between sequences sampled in 703010505 (A) at month 6 and the T/F ancestral state were significantly greater than the sequences in the next most variable individual (L) designated by the 9-digit identifier 704010042 (Wilcoxon rank sum, p=0.0003: CH505, median=0.064, range=0.019-0.13, N=25, and 704010042, median=0.0271, range=0.009-0.056, N=26).

What is claimed is:

1. A composition comprising any one of a nucleic acid encoding HIV-1 envelope w000.TF, w004.31, w004.54, w007.8, w007.21, w007.25, w007.34, w008.20, w009.19, w010.7, w020.15, w020.11, w020.24, w020.25, w022.6, w022.5, w022.9, w022.22, w030.20, w030.17, w030.21, w030.36, w030.26, w030.13, w030.32, w053.15, w053.29, w053.22, w053.8, w053.31, w053.9, w078.6, w078.36, w078.9, w078.26, w078.29, w078.30, w078.33, w078.17, w078.15, w078.27, w100.T3, w100.B10, w100.B2, w100.B4, w100.A11, w100.A13, w136.B10, w136.B5, w136.B2, w136.B23, w160.C1, w160.T3, w160.T4, or any combination thereof.

2. A composition comprising an HIV-1 envelope polypeptide w000.TF, w004.31, w004.54, w007.8, w007.21, w007.25, w007.34, w008.20, w009.19, w010.7, w020.15, w020.11, w020.24, w020.25, w022.6, w022.5, w022.9, w022.22, w030.20, w030.17, w030.21, w030.36, w030.26, w030.13, w030.32, w053.15, w053.29, w053.22, w053.8, w053.31, w053.9, w078.6, w078.36, w078.9, w078.26, w078.29, w078.30, w078.33, w078.17, w078.15, w078.27, w100.T3, w100.B10, w100.B2, w100.B4, w100.A11, w100.A13, w136.B10, w136.B5, w136.B2, w136.B23, w160.C1, w160.T3, w160.T4, or any combination thereof.

3. A composition comprising any one of a nucleic acid encoding HIV-1 envelope w000.TF, w020.15, w030.13,w020.25, w004.54, w020.11, w078.15, w053.22, w136.B23, w053.31, w136.B2, w100.A13, w100.B4, w160.T4, w030.21, w053.15, w078.17, w136.B10, w053.29, w078.33, w136.B5, w030.36, w030.17, w078.9, w030.20, w100.B2, w078.6, or any combination thereof.

4. A composition comprising an HIV-1 envelope polypeptide w000.TF, w020.15, w030.13,w020.25, w004.54, w020.11, w078.15, w053.22, w136.B23, w053.31, w136.B2, w100.A13, w100.B4, w160.T4, w030.21, w053.15, w078.17, w136.B10, w053.29, w078.33, w136.B5, w030.36, w030.17, w078.9, w030.20, w100.B2, w078.6, or any combination thereof.

5. The composition of any of claims 1-4 further comprising an HIV-1 envelope polypeptide or a nucleic acid encoding an HIV-1 envelope selected from the group consisting of M5, M6 and M11, or any combination thereof, wherein the HIV-1 envelope is a loop D mutant envelope.

6. The composition of claim 1 or 3 wherein the nucleic acid encodes a gp120 envelope, a gp120D8 envelope, a gp140 envelope, a gp145 envelope, a gp150 envelope, or a transmembrane bound envelope.

7. The composition of claim 2 or 4 wherein the HIV-1 envelope is a gp120 or a gp120D8 variant.

8. The composition of any of claims 1-4 further comprising an adjuvant.

9. The composition of any one of claim 1, 3, or 6 wherein the nucleic acid is operably linked to a promoter inserted an expression vector.

10. A method of inducing an immune response in a subject comprising administering the composition of any one of claim 1-7 or 9 in an amount sufficient to induce an immune response.

11. The method of claim 10, wherein the composition is administered as a prime.

12. The method of claim 10, wherein the composition is administered as a boost.

13. The method of claim 10, wherein the composition is administered as multiple boosts.

14. The method of claim 10, wherein the composition further comprises an adjuvant.

15. The method of claim 10, further comprising administering an agent which modulates host immune tolerance.

The application's sequence listing, which the Patent Office published only in electronic form, follows.

SEQUENCE LISTING (151 sequences)

SEQ ID NO: 1 - DNA, 2523 bp, Artificial Sequence
  Description of Artificial Sequence: Synthetic polynucleotide
atgagagtgatggggatacagaggaattatccacaatggtggatatggagcatgttaggcttttggatgctaatgatttgtaatgggatgtgggtcacagtctactatggggtacctgtgtggaaagaagcaaaaaccactctattttgtgcatcagatgctaaagcatatgagaaagaagtgcataatgtctgggctacacatgcctgtgtacccacagaccccaatccacaagaaatggttttaaaaaatgtaacagaaaatttcaacatgtggaaaaatgacatggtggatcagatgcatgaagatgtaattagtttatgggatcaaagcctcaagccatgtgtaaagttgaccccactctgtgtcactctaaactgtaccaatgctactgccagcaatagcagtataatagagggaatgaaaaattgctctttcaatataaccacagaattaagagataagagagagaaaaagaatgcacttttttataaacttgatatagtacaactagatggcaactctagtcagtatagattaataaattgtaatacctcagtcataacacaagcctgtccaaaggtctcttttgacccaattcctatacattattgtgctccagctggttatgcgattctaaagtgtaataataagacattcactggaacaggaccgtgtaataatgtcagcacagtacaatgtacacatggaattaagccagtggtttcaactcaactattgttaaatggtagcctagcagaaggagagataataattagatctgaaaatataacaaacaatgtcaaaacaataatagtacatctcaatgaatctgtaaagattgagtgtacgagacccaataataaaacaagaacaagtataagaataggaccaggacaagcattttatgcaacaggacaagtaataggagacataagagaagcatattgtaacattaatgaaagtaaatggaatgaaactttacaaagggtaagtaaaaaattaaaagaatacttccctcataagaatataacatttcaaccatcctcaggaggggacctagaaattacaacacatagctttaattgtggaggagaatttttctattgcaatacatcaagcctgtttaataggacatatatggctaatagtacagaaactaacagtacacgaaccatcacaatccactgcagaataaaacaaattataaacatgtggcaggaggtgggacgagcaatgtatgcccctcccattgcaggaaacataacatgtatatcaaatatcacaggactactattgacaagggatggaggaaaaaacaatacggagacattcagacctggaggaggaaatatgaaggacaattggagaagtgaattatataaatataaagtggtagaagttaagccattaggagtagcacccactaatgcaagaaggagagtggtggagagagaaaaaagagcagtgggaatgggagctgtgttccttgggttcttgggagcggcaggaagcactatgggcgcagcatcaataacgctgacggtacaggccagacaattattgtctggtatagtgcaacagcaaagcaatttgctgaaggctatagaggctcaacagcatatgttgaaactcacggtctggggcattaaacagctccaggcaagagtcctggccttggaaagatacctaaaggatcaacagctcctagggatgtggggctgctctggaaaactcatctgcaccactaatgtatattggaactctagttggagtaataaaacttatggtgatatttgggataacatgacctggatgcagtgggagagagaaattagcaattatacagaaataatatatgaattgcttgaagaatcacaaaaccagcaggaaaagaatgaacaagatttactagcattggacagatggaacagtctgtggaattggtttaacataacaaattggctgtggtatataaaaatattcataatgatagtaggaggcttgataggtttaagaataatttttgctgtgctttctttagtaaatagagttaggcagggatactcacctctgtcgttgcagacccttatcccaagcccgaggggaccagacaggcccggaggaatcgaagaagaaggtggagagcaagacagaaacagatcaacgcgattagtgagcggattcttagcgcttgtctgggacgacctgcggagcctgtgccttttcatctaccaccgattgagagacttcatattaattgcagcgagagcgggggaacttctgggacgcagcagtctcaagggactacggagaggatgggaagcccttaagtatctgggaagtcttgtgcagtattggggcctggaactaaaaaggagtgctattagtctattggataccctagcaatagcagtaggtgaaggaacagataggattctagaatttgtattaggaatttgtagagctatccgcaacatacctacaagaataagacagggctttgaaacagctttgctataa

SEQ ID NO: 2 - DNA, 2541 bp, Artificial Sequence
  Description of Artificial Sequence: Synthetic polynucleotide
atgagagtgatggggatacagaggaattatccacaatggtggatatggagcatgttaggcttttggatgctaatgatttgtaatgggatgtgggtcacagtctactatggggtacctgtgtggaaagaagcaaaaactactctattttgtgcatcagatgctaaagcatatgagaaagaagtgcataatgtctgggctacacatgcctgtgtacccacagaccccaatccacaagaaatggttttaaaaaatgtaacagaaaatttcaacatgtggaaaaatgacatggtggatcagatgcatgaagatgtaattagtttatgggatcaaagcctcaagccatgtgtaaagttgaccccactctgtgtcactctaaactgtaccaatgctactgccagcaatagcagtataatagagggaatgaaaaattgctctttcaatataaccacagaattaagagataggagagagaaaaagaatgcacttttttataaacttgatatagtacaactagatggcaactctagtcagtatagattaataaattgtaatacctcagtcataacacaagcctgtccaaaggtctcttttgacccaattcctatacattattgtgctccagctggttatgcgattctaaagtgtaataataagacattcactggaacaggaccgtgtaataatgtcagcacagtacaatgtacacatggaattaagccagtggtttcaactcaactattgttaaatggtagcctagcagaaggagagataataattagatctgaaaatataacaaaaaatgtcaaaacaataatagtacatctcaatgaatctgtaaagattgagtgtacgagacccaataataaaacaagaacaagtataagaataggaccaggacaagcattttatgcaacaggacaagtaataggagacataagagaagcatattgtaacattaatgaaagtaaatggaatgaaactttacaaagggtaagtaaaaaattaaaagaatacttccctcataagaatataacatttcaaccatcctcaggaggggacctagaaattacaacacatagctttaattgtggaggagaatttttctattgcaatacatcaagcctgtttaataggacatatatggctaatagtacagatatggctaatagtacagaaactaacagtacacgaaccatcacaatccgctgcagaataaaacaaattataaacatgtggcaggaggtgggacgagcaatgtatgcccctcccattgcaggaaacataacatgtatatcaaatatcacaggactactattgacaagggatggaggaaaaaacaatacggagacattcagacctggaggaggaaatatgaaggacaattggagaagtgaattatataaatataaagtggtagaagttaagccattaggagtagcacccactaatgcaagaaggagagtggtggagagagaaaaaagagcagtgggaatgggagctgtgttccttgggttcttgggagcggcaggaagcactatgggcgcagcatcaataacgctgacggtacaggccagacaattattgtctggtatagtgcaacagcaaagcaatttgctgaaggctatagaggctcaacagcatatgttgaaactcacggtctggggcattaaacagctccaggcaagagtcctggccttggaaagatacctaaaggatcaacagctcctagggatgtggggctgctctggaaaactcatctgcaccactaatgtatattggaactctagttggagtaataaaacttatggtgatatttgggataacatgacctggatgcagtgggagagagaaattagcaattatacagaaataatatatgaattgcttgaagaatcacaaaaccagcaggaaaagaatgaacaagatttactagcattggacagatggaacagtctgtggaattggtttaacataacaaattggctgtggtatataaaaatattcataatgatagtaggaggcttgataggtttaagaataatttttgctgtgctttctttagtaaatagagttaggcagggatactcacctctgtcgttgcagacccttatcccaagcccgaggggaccagacaggcccggaggaatcgaagaagaaggtggagagcaagacagaaacagatcaacgcgattagtgagcggattcttagcgcttgtctgggacgacctgcggagcctgtgccttttcatctaccaccgattgagagacttcatattaattgcagcgagagcgggggaacttctgggacgcagcagtctcaagggactacggagaggatgggaagcccttaagtatctgggaagtcttgtgcagtattggggcctggaactaaaaaggagtgctattagtctattggataccctagcaatagcagtaggtgaaggaacagataggattctagaatttgtattaggaatttgtagagctatccgcaacatacctacaagaataagacagggctttgaaacagctttgctataa

SEQ ID NO: 3 - DNA, 2541 bp, Artificial Sequence
  Description of Artificial Sequence: Synthetic polynucleotide
atgagagtgatggggatacagaggaattatccacaatggtggatatggagcatgttaggcttttggatgctaatgatttgtaatgggatgtgggtcacagtctactatggggtacctgtgtggaaagaagcaaaaactactctattttgtgcatcagatgctaaagcatatgagaaagaagtgcataatgtctgggctacacatgcctgtgtacccacagaccccaatccacaagaaatggttttaaaaaatgtaacagaaaatttcaacatgtggaaaaatgacatggtggatcagatgcatgaagacgtaattagtttatgggatcaaagcctcaagccatgtgtaaagttgaccccactctgtgtcactctaaactgtaccaatgctactgccagcaatagcagtataatagagggaatgaaaaattgctctttcaatataaccacagaattaagagataagagagagaaaaagaatgcacttttttataaacttgatatagtacaactagatggcaactctagtcagtatagattaataaattgtaatacctcagtcataacacaagcctgtccaaaggtctcttttgacccaattcctatacattattgtgctccagctggttatgcgattctaaagtgtaataataagacattcactggaacaggaccgtgtaataatgtcagcacagtacaatgtacacatggaattaagccagtggtttcaactcaactattgttaaatggtagcctagcagaaggagagataataattagatctgaaaatataacaaacaatgtcaaaacaataatagtacatctcaatgaatctgtaaagattgagtgtacgagacccaataataaaacaagaacaagtataagaataggaccaggacaagcattttatgcaacaggacaagtaataggagacataagagaagcatattgtaacattaatgaaagtaaatggaatgaaactttacaaagggtaagtaaaaaattaaaagaatacttccctcataagaatataacatttcaaccatcctcaggaggggacctagaaattacaacacatagctttaattgtggaggagaatttttctattgcaatacatcaagcctgtttaataggacatatatggctaatagtacagatatggctaatagtacagaaactaacagtacacaaaccatcacaatccactgcagaataaaacaaattataaacatgtggcaggaggtgggacgagcaatgtatgcccctcccattgcaggaaacataacatgtatatcaaatatcacaggactactattgacaagggatggaggaaaaaacaatacggagacattcagacctggaggaggaaatatgaaggacaattggagaagtgaattatataaatataaagtggtagaagttaagccattaggagtagcacccactaatgcaagaaggagagtggtggagagagaaaaaagagcagtgggaatgggagctgtgttccttgggttcttgggagcggcaggaagcactatgggcgcagcatcaataacgctgacggtacaggccagacaattattgtctggtatagtgcaacagcaaagcaatttgctgaaggctatagaggctcaacagcatatgttgaaactcacggtctggggcattaaacagctccaggcaagagtcctggccttggaaagatacctaaaggatcaacagctcctagggatgtggggctgctctggaaaactcatctgcaccactaatgtatattggaactctagttggagtaataaaacttatggtgatatttgggataacatgacctggatgcagtgggagagagaaattagcaattatacagaaataatatatgaattgcttgaagaatcacaaaaccagcaggaaaagaatgaacaagatttactagcattggacagatggaacagtctgtggaattggtttaacataacaaattggctgtggtatataaaaatattcataatgatagtaggaggcttgataggtttaagaataatttttgctgtgctttctttagtaaatagagttaggcagggatactcacctctgtcgttgcagacccttatcccaagcccgaggggaccagacaggcccggaggaatcgaagaagaaggtggagagcaagacagaaacagatcaacgcgattagtgagcggattcttagcgcttgtctgggacgacctgcggagcctgtgccttttcatctaccaccgattgagagacttcatattaattgcagcgagagcgggggaacttctgggacgcagcagtctcaagggactacggagaggatgggaagcccttaagtatctgggaagtcttgtgcagtattggggcctggaactaaaaaggagtgctattagtctattggataccctagcaatagcagtaggtgaaggaacagataggattctagaatttgtattaggaatttgtagagctatccgcaacatacctacaagaataagacagggctttgaaacagctttgctataa

SEQ ID NO: 4 - DNA, 2541 bp, Artificial Sequence
  Description of Artificial Sequence: Synthetic polynucleotide
atgagagtgatggggatacagaggaattatccacaatggtggatatggagcatgttaggcttttggatgctaatgatttgtaatgggatgtgggtcacagtctactatggggtacctgtgtggaaagaagcaaaaactactctattttgtgcatcagatgctaaagcatatgagaaagaagtgcataatgtctgggctacacatgcctgtgtacccacagaccccaatccacaagaaatggttttaaaaaatgtaacagaaaatttcaacatgtggaaaaatgacatggtggatcagatgcatgaagatgtaattagtttatgggatcaaagcctcaagccatgtgtaaagttgaccccactctgtgtcactctaaactgtaccaatgctactgccagcaatagcagaataatagagggaatgaaaaattgctctttcaatataaccacagaattaagagataagagagagaaaaagaatgcacttttttataaacttgatatagtacaactagatggcaactctagtcagtatagattaataaattgtaatacctcagtcataacacaagcctgtccaaaggtctcttttgacccaattcctatacattattgtgctccagctggttatgcgattctaaagtgtaataataagacattcactggaacaggaccgtgtaataatgtcagcacagtacaatgtacacatggaattaagccagtggtttcaactcaactattgttaaatggtagcctagcagaaggagagataataattagatctgaaaatataacaaacaatgtcaaaacaataatagtacatctcaatgaatctgtaaagattgagtgtacgagacccaataataaaacaagaacaagtataagaataggaccaggacaagcattttatgcaacaggacaagtaataggagacataagagaagcatattgtaacattaatgaaagtaaatggaatgaaactttacaaagggtaagtaaaaaattaaaagaatacttccctcataagaatataacatttcaaccatcctcaggaggggacctagaaattacaacacatagctttaattgtggaggagaatttttctattgcaatacatcaagcctgtttaataggacatatatggctaatagtacagatatggctaatagtacagaaactaacagtacacgaaccatcataatccactgcagaataaaacaaattataaacatgtggcaggaggtgggacgagcaatgtatgcccctcccattgcaggaaacataacatgtatatcaaatatcacaggactactattgacaagggatggaggaaaaaacaatacggagacattcagacctggaggaggaaatatgaaggacaattggagaagtgaattatataaatataaagtggtagaagttaagccattaggagtagcacccactaatgcaagaaggagagtggtggagagagaaaaaagagcagtgggaatgggagctgtgttccttgggttcttgggagcggcaggaagcactatgggcgcagcatcaataacgctgacggtacaggccagacaattattgtctggtatagtgcaacagcaaagcaatttgctgaaggctatagaggctcaacagcatatgttgaaactcacggtctggggcattaaacagctccaggcaagagtcctggccttggaaagatacctaaaggatcaacagctcctagggatgtggggctgctctggaaaactcatctgcaccactaatgtatattggaactctagttggagtaataaaacttatggtgatatttgggataacatgacctggatgcagtgggagagagaaattagcaattatacagaaataatatatgaattgcttgaagaatcacaaaaccagcaggaaaagaatgaacaagatttactagcattggacagatggaacagtctgtggaattggtttaacataacaaattggctgtggtatataaaaatattcataatgatagtaggaggcttgataggtttaagaataatttttgctgtgctttctttagtaaatagagttaggcagggatactcacctctgtcgttgcagacccttatcccaagcccgaggggaccagacaggcccggaggaatcgaagaagaaggtggagagcaagacagaaacagatcaacgcgattagtgagcggattcttagcgcttgtctgggacgacctgcggagcctgtgccttttcatctaccaccgattgagagacttcatattaattgcagcgagagcgggggaacttctgggatgcagcagtctcaagggactacggagaggatgggaagcccttaagtatctgggaagtcttgtgcagtattggggcctggaactaaaaaggagtgctattagtctattggataccctagcaatagcagtaggtgaaggaacagataggattctagaatttgtattaggaatttgtagagctatccgcaacatacctacaagaataagacagggctttgaaacagctttgctataa

SEQ ID NO: 5 - DNA, 2541 bp, Artificial Sequence
  Description of Artificial Sequence: Synthetic polynucleotide
atgagagtgatggggatacagaggaattatccacaatggtggatatggagcatgttaggcttttggatgctaatgatttgtaatgggatgtgggtcacagtctactatggggtacctgtgtggaaagaagcaaaaactactctattttgtgcatcagatgctaaagcatatgagaaagaagtgcataatgtctgggctacacatgcctgtgtacccacagaccccaatccacaagaaatggttttaaaaaatgtaacagaaaatttcaacatgtggaaaaatgacatggtggatcagatgcatgaagatgtaattagtttatgggatcaaagcctcaagccatgtgtaaagttgaccccactctgtgtcactctaaactgtaccaatgctactgccagcaatagcagtataatagagggaatgaaaaattgctctttcaatataaccacagaattaagagataagagagagaaaaagaatgcacttttttataaacttgatatagtacaactagatggcaactctagtcagtatagattaataaattgtaatacctcagtcataacacaagcctgtccaaaggtctcttttgacccaattcctatacattattgtgctccagctggttatgcgattctaaagtgtaataataagacattcactggaacaggaccgtgtaataatgtcagcacagtacaatgtacacatggaattaagccagtggtttcaactcaactattgttaaatggtagcctagcagaaggagagataataattagatctgaaaatataacaaacaatgtcaaaacaataatagtacatctcaatgaatctgtaaagattgagtgtacgagacccaataataaaacaagaacaagtataagaataggaccaggacaagcattttatgcaacaggacaagtaataggagacataagagaagcatattgtaacattaatgaaagtaaatggaatgaaactttacaaagggtaagtaaaaaattaaaagaatacttccctcataagaatataacatttcaaccatcctcaggaggggacctagaaattataacacatagctttaattgtggaggagaatttttctattgcaatacatcaagcctgtttaataggacatatatggctaatagtacagatatggctaatagtacagaaactaacagtacacgaatcatcacaatccactgcagaataaaacaaattataaacatgtggcaggaggtgggacgagcaatgtatgcccctcccattgcaggaagcataacatgtatatcaaatatcacaggactactattgacaagggatggaggaaaaaacaatatggagacattcagacctggaggaggaaatatgaaggacaattggagaagtgaattatataaatataaagtggtagaagttaagccattaggagtagcacccactaatgcaagaaggagagtggtggagagagaaaaaagagcagtgggaatgggagctgtgttccttgggttcttgggagcggcaggaagcactatgggcgcagcatcaataacgctgacggtacaggccagacaattattgtctggtatagtgcaacagcaaagcaatttgctgaaggctatagaggctcaacagcatatgttgaaactcacggtctggggcattaaacagctccaggcaagagtcctggccttggaaagatacctaaaggatcaacagctcctagggatgtggggctgctctggaaaactcatctgcaccactaatgtatattggaactctagttggagtaataaaacttatggtgatatttgggataacatgacctggatgcagtgggagagagaaattagcaattatacagaaataatatatgaattgcttgaagaatcacaaaaccagcaggaaaagaatgaacaagatttactagcattggacagatggaacagtctgtggaattggtttaacataacaaattggctgtggtatataaaaatattcataatgatagtaggaggcttgataggtttaagaataatttttgctgtgctttctttagtaaatagagttaggcagggatactcacctctgtcgttgcagacccttatcccaagcccgaggggaccagacaggcccggaggaatcgaagaagaaggtggagagcaagacagaaacagatcaacgcgattagtgagcggattcttagcgcttgtctgggacgacctgcggagcctgtgccttttcatctaccaccgattgagagacttcatattaattgcagcgagagcgggggaacttctgggacgcagcagtctcaagggactacggagaggatgggaagcccttaagtatctgggaagtcttgtgcagtattggggcctggaactaaaaaggagtgctattagtctattggataccctagcaatagcagtaggtgaaggaacagataggattctagaatttgtattaggaatttgtagagctatccgcaacatacctacaagaataagacagggctttgaaacagctttgctataa

SEQ ID NO: 6 - DNA, 2541 bp, Artificial Sequence
  Description of Artificial Sequence: Synthetic polynucleotide
atgagagtgatggggatacagaggaattatccacaatggtggatatggagcatgttaggcttttggatgctaatgatttgtaatgggatgtgggtcacagtctactatggggtacctgtgtggaaagaagcaaaaactactctattttgtgcatcagatgctaaagcatatgagaaagaagtgcataatgtctgggctacacatgcctgtgtacccacagaccccaatccacaagaaatggttttaaaaaatgtaacagaaaatttcaacatgtggaaaaatgacatggtggatcagatgcatgaagatgtaattagtttatgggatcaaagcctcaagccatgtgtaaagttgaccccactctgtgtcactctaaactgtaccaatgctactgccagcaatagcagtataatagagggaatgaaaaattgctctttcaatataaccacagaattaagagataagagagagaaaaagaatgcacttttttataaacttgatatagtacaactagatggcaactctagtcagtatagattaataaattgtaatacctcagtcataacacaagcctgtccaaaggtctcttttgacccaattcctatacattattgtgctccagctggttatgcgattctaaggtgtaataataagacattcactggaacaggaccgtgtaataatgtcagcacagtacaatgtacacatggaattaagccagtggtttcaactcaactattgttaaatggtagcctagcagaaggagagataataattagatccgaaaatataacaaacaatgccaaaacaataatagtacatctcaatgaatctgtaaagattgagtgtacgagacccaataataaaacaagaacaagtataagaataggaccaggacaagcattttatgcaacaggacaagtaataggagacataagagaagcatattgtaacattaatgaaagtaaatggaatgaaactttacaaagggtaagtaaaaaattaaaagaatacttccctcataagaatataacatttcaaccatcctcaggaggggacctagaaattacaacacatagctttaattgtggaggagaatttttctattgcaatacatcaagcctgtttaataggacatatatggctaatagtacagatatggctaatagtacagaaactaacagtacacgaaccatcacactccactgcagaataaaacaaattataaacatgtggcaggaggtgggacgagcaatgtatgcccctcccattgcaggaaacataacatgtatatcaaatatcacaggactactattgacaagggatggaggaaaaaacaatacggagacattcagacctggaggaggaaatatgaaggacaattggagaagtgaattatataaatataaagtggtagaagttaagccattaggagtagcacccactaatgcaagaaggagagtggtggagagagaaaaaagagcagtgggaatgggagctgtgttccttgggttcttgggagcggcaggaagcactatgggcgcagcatcaataacgctgacggtacaggccagacaattattgtctggtatagtgcaacagcaaagcaatttgctgaaggctatagaggctcaacagcatatgttgaaactcacggtctggggcattaaacagctccaggcaagagtcctggccttggaaagatacctaaaggatcaacagctcctagggatgtggggctgctctggaaaactcatctgcaccactaatgtatattggaactctagttggagtaataaaacttatggtgatatttgggataacatgacctggatgcagtgggagagagaaattagcaattatacagaaataatatatgaattgcttgaagaatcacaaaaccagcaggaaaagaatgaacaagatttactagcattggacagatggaacagtctgtggaattggtttaacataacaaattggctgtggtatataaaaatattcataatgatagtaggaggcttgataggtttaagaataatttttgctgtgctttctttagtaaatagagttaggcagggatactcacctctgtcgttgcagacccttatcccaagcccgaggggaccagacaggcccggaggaatcgaagaagaaggtggagagcaagacagaaacagatcaacgcgattagtgagcggattcttagcgcttgtctgggacgacctgcggagcctgtgccttttcatctaccaccgattgagagacttcatattaattgcagcgagagcgggggaacttctgggacgcagcagtctcaagggactacggagaggatgggaagcccttaagtatctgggaagtcttgtgcagtattggggcctggaactaaaaaggagtgctattagtctattggataccctagcaatagcagtaggtgaaggaacagataggattctagaatttgtattaggaatttgtagaactatccgcaacatacctacaagaataagacagggctttgaaacagctttgctataa

SEQ ID NO: 7 - DNA, 2541 bp, Artificial Sequence
  Description of Artificial Sequence: Synthetic polynucleotide
atgagagtgatggggatacagaggaattatccacaatggtggatatggagcatgttaggcttttggatgctaatgatttgtaatgggatgtgggtcacagtctactatggggtacctgtgtggaaagaagcaaaaactactctattttgtgcatcagatgctaaagcatatgagaaagaagtgcataatgtctgggctacacatgcctgtgtacccacagaccccaatccacaagaaatggttttaaaaaatgtaacagaaaatttcaacatgtggaaaaatgacatggtggatcagatgcatgaagacgtaattagtttatgggatcaaagcctcaagccatgtgtaaagttgaccccactctgtgtcactctaaactgtaccaatgctactgccagcaatagcagtataatagagggaatgaaaaattgctctttcaatataaccacagaattaagagataagagagagaaaaagaatgcacttttttataaacttgatatagtacaactagatggcaactctagtcagtatagattaataaattgtaatacctcagtcataacacaagcctgtccaaaggtctcttttgacccaattcctatacattattgtgctccagctggttatgcgattctaaagtgtaataataagacattcactggaacaggaccgtgtaataatgtcagcacagtacaatgtacacatggaattaagccagtggtttcaactcaactattgttaaatggtagcctagcagaaggagagataataattagatctgaaaatataacaaacaatggcaaaacaataatagtacatctcaatgaatctgtaaagattgagtgtacgagacccaataataaaacaagaacaagtataagaataggaccaggacaagcattttatgcaacaggacaagtaataggagacataagagaagcatattgtaacattaatgaaagtaaatggaatgaaactttacaaagggtaagtaaaaaattaaaagaatacttccctcataagaatataacatttcaaccatcctcaggaggggacctagaaattacaacacatagctttaattgtggaggagaatttttctattgcaatacatcaagcctgtttaataggacatatatggccaatagtacagatatggctaatagtacagaaactaacagtacacgaaccatcacaatccactgcagaataaaacaaattataaacatgtggcaggaggtgggacgagcaatgtatgcccctcccattgcaggaaacataacatgtatatcaaatatcacaggactactattgacaagggatggaggaaaaaacaatacggagacattcagacctggaggaggaaatatgaaggacaattggagaagtgaattatataaatataaagtggtagaagttaagccattaggagtagcacccactaatgcaagaaggagagtggtggagagagaaaaaagagcagtgggaatgggagctgtgttccttgggttcttgggagcggcaggaagcactatgggcgcagcatcaataacgctgacggtacaggccagacaattattgtctggtatagtgcaacagcaaagcaatttgctgaaggctatagaggctcaacagcatatgttgaaactcacggtctggggcattaaacagctccaggcaagagtcctggccttggaaagatacctaaaggatcaacagctcctagggatgtggggctgctctggaaaactcatctgcaccactaatgtatattggaactctagttggagtaataaaacttatggtgatatttgggataacatgacctggatgcagtgggagagagaaattagcaattatacagaaataatatatgaattgcttgaagaatcacaaaaccagcaggaaaagaatgaacaagatttactagcattggacagatggaacagtctgtggaattggtttaacataacaaattggctgtggtatataaaaatattcataatgatagtaggaggcttgataggtttaagaataatttttgctgtgctttctttagtaaatagagttaggcagggatactcacctctgtcgttgcagacccttatcccaagcccgaggggaccagacaggcccggaggaatcgaagaagaaggtggagagcaagacagaaacagatcaacgcgattagtgagcggattcttagcgcttgtctgggacgacctgcggagcctgtgccttttcatctaccaccgattgagagacttcatattaattgcagcgagagcgggggaacttctgggacgcagcagtctcaagggactacggagaggatgggaagcccttaagtatctgggaagtcttgtgcagtattggggcctggaactaaaaaggagtgctattagtctattggataccctagcaatagcagtaggtgaaggaacagataggattctagaatttgtattaggaatttgtagagctatccgcaacatacctacaagaataagacagggctttgaaacagctttgctataa

SEQ ID NO: 8 - DNA, 2541 bp, Artificial Sequence
  Description of Artificial Sequence: Synthetic polynucleotide
atgagagtgatggggatacagaggaattatccacaatggtggatatggagcatgttaggcttttggatgctaatgatttgtaatgggatgtgggtcacagtctactatggggtacctgtgtggaaagaagcaaaaactactctattttgtgcatcagatgctaaagcatatgagaaagaagtgcataatgtctgggctacacatgcctgtgtacccacagaccccaatccacaagaaatggttttaaaaaatgtaacagaaaatttcaacatgtggaaaaatgacatggtggatcagatgcatgaagatgtaattagtttatgggatcaaagcctcaagccatgtgtaaagttgaccccactctgtgtcactctaaactgtaccaatgctactgccagcaatagcagtataatagagggaatgaaaaattgctctttcaatataaccacagaattaagagataagagagagaaaaagaatgcacttttttataaacttgatatagtacaactagatggcaactctagtcagtatagattaataaattgtaatacctcagtcataacacaagcctgtccaaaggtctcttttgacccaattcctatacattattgtgctccagctggttatgcgattctaaagtgtaataataagacattcactggaacaggaccgtgtaataatgtcagcacagtacaatgtacacatggaattaagccagtggtttcaactcaactattgttaaatggtagcctagcagaaggagagataataattagatctgaaaatataacaaacaatgtcaaaacaataatagtacatctcaatgaatctgtaaagattgagtgtacgagacccaataataaaacaagaacaagtataagaataggaccaggacaagcattttatgcaacaggacaagtaataggagacataagagaagcatattgtaacattaatgaaagtaaatggaatgaaactttacaaagggtaagtaaaaaattaaaagaatacttccctcataagaatataacatttcaaccatcctcaggaggggacctagaaattacaacacatagctttaattgtggaggagaatttttctattgcaatacatcaagcctgtttaataggacatatatggctaatagtacagatatggctaatagtacagaaactaacagtacacgaaccatcacaatcaactgcagaataaaacaaattataaacatgtggcaggaggtgggacgagcaatgtatgcccctcccattgcaggaaacataacatgtatatcaaatatcacaggactaatattgacaagggatggaggaaaaaacaatacggagacattcagacctggaggaggaaatatgaaggacaattggagaagtgaattatataaatataaagtggtagaagttaagccattaggagtagcacccactaatgcaagaaggagagtggtggagagagaaaaaagagcagtgggaatgggagctgtgttccttgggttcttgggagcggcaggaagcactatgggcgcagcatcaataacgctgacggtacaggccagacaattattgtctggtatagtgcaacagcaaagcaatttgctgaaggctatagaggctcaacagcatatgttgaaactcacggtctggggcattaaacagctccaggcaagagtcctggccttggaaagatacctaaaggatcaacagctcctagggatgtggggctgctctggaaaactcatctgcaccactaatgtatattggaactctagttggagtaataaaacttatggtgatatttgggataacatgacctggatgcagtgggagagagaaattagcaattatacagaaataatatatgaattgcttgaagaatcacaaaaccagcaggaaaagaatgaacaagatttactagcattggacagatggaacagtctgtggaattggtttaacataacaaattggctgtggtatataaaaatattcataatgatagtaggaggcttgataggtttaagaataatttttgctgtgctttctttagtaaatagagttaggcagggatactcacctctgtcgttgcagacccttatcccaagcccgaggggaccagacaggcccggaggaatcgaagaagaaggtggagagcaagacagaaacagatcaacgcgattagtgagcggattcttagcgcttgtctgggacgacctgcggagcctgtgccttttcatctaccaccgattgagagacttcatattaattgcagcgagagcgggggaacttctgggacgcagcagtctcaagggactacggagaggatgggaagcccttaagtatctgggaagtcttgtgcagtattggggcctggaactaaaaaggagtgctattagtctattggataccctagcaatagcagtaggtgaaggaacagataggattctagaatttgtattaggaatttgtagagctatccgcaacatacctacaagaataagacagggctttgaaacagctttgctataa

SEQ ID NO: 9 - DNA, 2556 bp, Artificial Sequence
  Description of Artificial Sequence: Synthetic polynucleotide
atgagagtgatggggatacagaggaattatccacaatggtggatatggagcatgttaggcttttggatgctaatgatttgtaatgggatgtgggtcacagtctactatggggtacctgtgtggaaagaagcaaaaactactctattttgtgcatcagatgctaaagcatatgagaaagaagtgcataatgtctgggctacacatgcctgtgtacccacagaccccaatccacaagaaatggttttaaaaaatgtaacagaaaatttcaacatgtggaaaaatgacatggtggatcagatgcatgaagatgtaattagtttatgggatcaaagcctcaagccatgtgtaaagttgaccccactctgtgtcactctaaactgtaccaatgctactgccagcaatgctactgccagcaatagcagtataatagagggaatgaaaaattgctctttcaatataaccacagaattaagagataagagagagaaaaagaatgcacttttttataaacttgatatagtacaactagatggcaactctagtcagtatagattaataaattgtaatacctcagtcataacacaagcctgtccaaaggtctcttttgacccaattcctatacattattgtgctccagctggttatgcgattctaaagtgtaataataagacattcactggaacaggaccgtgtaataatgtcagcacagtacaatgtacacatggaattaagccagtggtttcaactcaactattgttaaatggtagcctagcagaaggagagataataattagatctgaaaatataacaaacaatgccaaaacaataatagtacatctcaatgaatctgtaaagattgagtgtacgagacccaataataaaacaagaacaagtataagaataggaccaggacaagcattttatgcaacaggacaagtaataggagacataagagaagcacattgtaacattagtgaaagtaaatggaatgaaactttacaaagggtaagtaaaaaattaaaagaatacttccctcataagaatataacatttcaaccatcctcaggaggggacctagaaattacaacacatagctttaattgtggaggagaatttttctattgcaatacatcaagcctgtttaataggacatatatggctaatagtacagatatggctaatagtacagaaactaacagtacacgaatcatcacaatccactgcagaataaaacaaattataaacatgtggcaggaggtgggacgagcaatgtatgcccctcccattgcaggaaacataacatgtatatcaaatatcacaggactactattgacaagggatggaggaaaaaacaatacggagacattcagacctggaggaggaaatatgaaggacaattggagaagtgaattatataaatataaagtggtagaagttaagccattaggagtagcacccactaatgcaagaaggagagtggtggagagagaaaaaagagcagtgggaatgggagctgtgttccttgggttcttgggagcggcaggaagcactatgggcgcagcatcaataacgctgacggtacaggccagacaattattgtctggtatagtgcaacagcaaagcaatttgctgaaggctatagaggctcaacagcatatgttgaaactcacggtctggggcattaaacagctccaggcaagagtcctggccttggaaagatacctaaaggatcaacagctcctagggatgtggggctgctctggaaaactcatctgcaccactaatgtatattggaactctagttggagtaataaaacttatggtgatatttgggataacatgacctggatgcagtgggagagagaaattagcaattatacagaaataatatatgaattgcttgaagaatcacaaaaccagcaggaaaagaatgaacaagatttactagcattggacagatggaacagtctgtggaattggtttaacataacaaattggctgtggtatataaaaatattcataatgatagtaggaggcttgataggtttaagaataatttttgctgtgctttctttagtaaatagagttaggcagggatactcacctctgtcgttacagacccttatcccaagcccgaggggaccagacaggcccggaggaatcgaagaagaaggtggagagcaagacagaaacagatcaacgcgattagtgagcggattcttagcgcttgtctgggacgacctgcggagcctgtgccttttcatctaccaccgattgagagacttcatattaattgcagcgagagcgggggaacttctgggacgcagcagtctcaagggactacggagaggatgggaagcccttaagtatctgggaagtcttgtgcagtattggggcctggaactaaaaaggagtgctattagtctattggataccctagcaatagcagtaggtgaaggaacagataggattctagaatttgtattaggaatttgtagagctatccgcaacatacctacaagaataagacagggctttgaaacagctttgctataa

SEQ ID NO: 10 - DNA, 2553 bp, Artificial Sequence
  Description of Artificial Sequence: Synthetic polynucleotide
atgagagtgatggggatacagaggaattatccacaatggtggatatggagcatgttaggcttttggatgctaatgatttgtaatgggatgtgggtcacagtctactatggggtacctgtgtggaaagaagcaaaaactactctattttgtgcatcagatgctaaagcatatgagaaagaagtgcataatgtctgggctacacatgcctgtgtacccacagaccccaatccacaagaaatggttttaaaaaatgtaacagaaaatttcaacatgtggaaaaatgacatggtggatcagatgcatgaagacgtaattagtttatgggatcaaagcctcaagccatgtgtaaagttgaccccactctgtgtcactctaaactgtaccaatgctactaccaatgctactgccagcaatagcagtataatagagggaatgaaaaattgctctttcaatataaccacagaattaagagataagagagagaaaaagaatgcacttttttataaacttgatatagtacaactagatggcaactctagtcagtatagattaataaattgtaatacctcagtcataacacaagcctgtccaaaggtctcttttgacccaattcctatacattattgtgctccagctggttatgcgattctaaagtgtaataataagacattcactggaacaggaccgtgtaataatgtcagcacagtacaatgtacacatggaattaagccagtggtttcaactcaactattgttaaatggtagcctagcagaaggagagataataattagatctgaaaatataacaaacaatgccaaaacaataatagtacatctcaatgaatctgtaaagattgagtgtacgagacccagtaataaaacaagaacaagtataagaataggaccaggacaagcattttatgcaacaggacaagtaataggagacataagagaagcatattgtaacattagtgaaagtaaatggaatgaaactttacaaagggtaagtaaaaaattaaaagaatacttccctcataagaatataacatttcaaccatcctcaggaggggacctagaaattacaacacatagctttaattgtggaggagaatttttctattgcaatacatcaagcctgtttaataggacatatatggctaatagtacagatatggctaatagtacagaaactaacagtacacgaaccatcacaatccgctgcagaataaaacaaattataaacatgtggcaggaggtgggacgagcaatgtatgcccctcccattgcaggaaacataacatgtatatcaaatatcacaggactactattgacaagggatggaggaaaaaccaatacggagacattcagacctggaggaggaaatatgaaggacaattggagaagtgaattatataaatataaagtggtagaagttaagccattaggagtagcacccactaatgcaagaaggagagtggtggagagagaaaaaagagcagtgggaatgggagctgtgttccttgggttcttgggagcggcaggaagcactatgggcgcagcatcaataacgctgacggtacaggccagacaattattgtctggtatagtgcaacagcaaagcaatttgctgaaggctatagaggctcaacagcatatgttgaaactcacggtctggggcattaaacagctccaggcaagagtcctggccttggaaagatacctaaaggatcaacagctcctagggatgtggggctgctctggaaaactcatctgcaccactaatgtatattggaactctagttggagtaataaaacttatggtgatatttgggataacatgacctggatgcagtgggagagagaaattagcaattatacagaaataatatatgaattgcttgaagaatcacaaaaccagcaggaaaagaatgaacaagatttactagcattggacagatggaacagtctgtggaattggtttaacataacaaattggctgtggtatataaaaatattcataatgatagtaggaggcttgataggtttaagaataatttttgctgtgctttctttagtaaatagagttaggcagggatactcacctctgtcgttgcagacccttatcccaagcccgaggggaccagacaggcccggaggaatcgaagaagaaggtggagagcaagacagaaacagatcaacgcgattagtgagcggattcttagcgcttgtctgggacgacctgcggagcctgtgccttttcatctaccaccgattgagagacttcatattaattgcagcgagagcgggggaacttctgggacgcagcagtctcaagggactacggagaggatgggaagcccttaagtatctgggaagtcttgtgcagtattggggcctggaactaaaaaggagtgctattagtctattggataccctagcaataacagtaggtgaaggaacagataggattctagaatttgtattaggaatttgtagagctatccgcaacatacctacaagaataagacagggctttgaaacagctttgctataa

SEQ ID NO: 11 - DNA, 2538 bp, Artificial Sequence
  Description of Artificial Sequence: Synthetic polynucleotide
atgagagtgatggggatacagaggaattatccacaatggtggatatggagcatgttaggcttttggatgctaatgatttgtaatgggatgtgggtcacagtctactatggggtacctgtgtggaaagaagcaaaaactactctattttgtgcatcagatgctaaagcatatgagaaagaagtgcataatgtctgggctacacatgcctgtgtacccacagaccccaatccacaagaaatggttttaaaaaatgtaacagaaaatttcaacatgtggaaaaatgacatggtggatcagatgcatgaagatgtaattagtttatgggatcaaagcctcaagccatgtgtaaagttgaccccactctgtgtcactctaaactgtaccaatgctactgccagcaatagcagtatagagggaatgaaaaattgctctttcaatataaccacagaattaagagataagagagagaaaaagaatgcacttttttataaacttgatatagtacaactagatggcaactctagtcagtatagattaataaattgtaatacctcagtcataacacaagcctgtccaaaggtctcttttgacccaattcctatacattattgtgctccagctggttatgcgattctaaagtgtaataataagacattcactggaacaggaccgtgtaataatgtcagcacagtacaatgtacacatggaattaagccagtggtttcaactcaactattgttaaatggtagcctagcagaaggagagataataattagatctgaaaatataacaaacaatggcaaaacaataatagtgcatctcaatgaatctgtaaagattgagtgtacgagacccaataacaaaacaagaacaagtataagaataggaccaggacaagcattttatgcaacaggacaagtaataggagacataagagaagcatattgtaacattagtgaaagtaaatggaatgaaactttacaaagggtaagtaaaaaattaaaagaatacttccctcataagaatataacatttcaaccatcctcaggaggggacctagaaattacaacacatagctttaattgtggaggagaatttttctattgcaatacatcaagcctgtttaataggacatatatggctaatagtacagatatggctaatagtacagaaactaacagtacacgaatcatcacaatccactgcagaataaaacaaattataaacatgtggcaggaggtgggacgagcaatgtatgcccctcccattgcaggaaacataacatgtatatcaaatatcacaggactactattgacaagggatggaggaaaaaacaatacggagacgttcagacctggaggaggaaatatgaaggacaattggagaagtgaattatataaatataaagtggtagaagttaagccattaggagtagcacccactaatgcaagaaggagagtggtggagagagaaaaaagagcagtgggaatgggagctgtgttccttgggttcttgggagcggcaggaagcactatgggcgcagcatcaataacgctgacggtacaggccagacaattattgtctggtatagtgcaacagcaaagcaatttgctgaaggctatagaggctcaacagcatatgttgaaactcacggtctggggcattaaacagctccaggcaagagtcctggccttggaaagatacctaaaggatcaacagctcctagggatgtggggctgctctggaaaactcatctgcaccactaatgtatattggaactctagttggagtaataaaacttatggtgatatttgggataacatgacctggatgcagtgggagagagaaattagcaattatacagaaataatatatgaattgcttgaagaatcacaaaaccagcaggaaaagaatgaacaagatttactagcattggacagatggaacagtctgtggaattggtttaacataacaaattggctgtggtatataaaaatattcataatgatagtaggaggcttgataggtttaagaataatttttgctgtgctttctttagtaaatagagttaggcagggatactcacctctgtcgttgcagacccttatcccaagcccgaggggaccagacaggcccggaggaatcgaagaagaaggtggagagcaagacagaaacagatcaacgcgattagtgagcggattcttagcgcttgtctgggacgacctgcggagcctgtgccttttcatctaccaccgattgagagacttcatattaattgcagcgagagcgggggaacttctgggacgcagcagtctcaagggactacggagaggatgggaagcccttaagtatctgggaagtcttgtgcagtattggggcctggaactaaaaaggagtactattagtctattggataccctagcaatagcagtaggtgaaggaacagataggattctagaatttgtattaggaatttgtagagctatccgcaacatacctacaagaataagacagggctttgaaacagctttgctataa

SEQ ID NO: 12 - DNA, 2541 bp, Artificial Sequence
  Description of Artificial Sequence: Synthetic polynucleotide
atgagagtgatggggatacagaggaattatccacaatggtggatatggagcatgttaggcttttggatgctaatgatttgtaatgggatgtgggtcacagtctactatggggtacctgtgtggaaagaagcaaaaactactctattttgtgcatcagatgctaaagcatatgagaaagaagtgcataatgtctgggctacacatgcctgtgtacccacagaccccaatccacaagaaatggttttaaaaaatgtaacagaaaatttcaacatgtggaaaaatgacatggtggatcagatgcatgaagacgtaattagtttatgggatcaaagcctcaagccatgtgtaaagttgaccccactctgtgtcactctaaactgtaccaatgctactgccagcaatagcagtataatagaggaaatgaaaaattgctctttcaatataatcacagaattaagagataagagagagaaaaagaatgcacttttttataaacttgatatagtacaactagatggcaactctagtcagtatagattaataaattgtaatacctcagtcataacacaagcctgtccaaaggtctcttttgacccaattcctatacattattgtgctccagctggttatgcgattctaaagtgtaataataagacattcactggaacaggaccgtgtaataatgtcagcacagtacaatgtacacatggaattaagccagtggtttcaactcaactattgttaaatggtagcctagcagaaggagagataataattagatctgaaaatataacaaacaatgtcaaaacaataatagtacatctcaatgaatctgtaaagattgagtgtacgagacccaataataaaacaagaacaagtataagaataggaccaggacaagcattttatgcaacaggacaagtaataggagacataagagaagcatattgtaacattaatgaaagtaaatggaatgaaactttacaaagggtaagtaaaaaattaaaagaatacttccctcataagaatataacatttcaaccatcctcaggaggggacctagaaattacaacacatagctttaattgtggaggagaatttttctattgcaatacatcaagcctgtttaataggacatatatggctaatagtacagatatggctaatagtacagaaactaacagtacacgaaacatcacaatccactgcagaataaaacaaattataaacatgtggcaggaggtgggacgagcaatgtatgcccctcccattgcaggaaacataacatgtatatcaaatatcacaggactactattgacaagggatggaggaaaaaacaatacggagacattcagacctggaggaggaaatatgaaggacaattggagaagtgaattatataaatataaagtggtagaagttaagccattaggagtagcacccactaatgcaagaaggagagtggtggagagagaaaaaagagcagtgggaatgggagctgtgttccttgggttcttgggagcggcaggaagcactatgggcgcagcatcaataacgctgacggtacaggccagacaattattgtctggtatagtgcaacagcaaagcaatttgctgaaggctatagaggctcaacagcatatgttgaaactcacggtctggggcattaaacagctccaggcaagagtcctggccttggaaagatacctaaaggatcaacagctcctagggatgtggggctgctctggaaaactcatctgcaccactaatgtatattggaactctagttggagtaataaaacttatggtgatatttgggataacatgacctggatgcagtgggagagagaaattagcaattatacagaaataatatatgaattgcttgaagaatcacaaaaccagcaggaaaagaatgaacaagatttactagcattggacagatggaacagtctgtggaattggtttaacataacaaattggctgtggtatataaaaatattcataatgatagtaggaggcttgataggtttaagaataatttttgctgtgctttctttagtaaatagagttaggcagggatactcacctctgtcgttgcagacccttatcccaagcccgaggggaccagacaggcccggaggaatcgaagaagaaggtggagagcaagacagaaacagatcaacgcgattagtgagcggattcttagcgcttgtctgggacgacctgcggagcctgtgccttttcatctaccaccgattgagagacttcatattaattgcagcgagagcgggggaacttctgggacgcagcagtctcaagggactacggagaggatgggaagcccttaagtatctgggaagtcttgtgcagtattggggcctggaactaaaaaggagtgctattagtctattggataccctagcaatagcagtaggtgaaggaacagataggattctagaatttgtattaggaatttgtagagctatccgcaacatacctacaagaataagacagggctttgaaacagctttgctataa

SEQ ID NO: 13 - DNA, 2544 bp, Artificial Sequence
  Description of Artificial Sequence: Synthetic polynucleotide
atgagagtgatggggatacagaggaattatccacaatggtggatatggagcatgttaggcttttggatgctaatgatttgtaatgggatgtgggtcacagtctactatggggtacctgtgtggaaagaagcaaaaactactctattttgtgcatcagatgctaaagcatatgagaaagaagtgcataatgtctgggctacacatgcctgtgtacccacagaccccaatccacaagaaatggttttaaaaaatgtaacagaaaatttcaacatgtggaaaaatgacatggtggatcagatgcatgaagatgtaattagtttatgggatcaaagcctcaagccatgtgtaaagttgaccccactctgtgtcactctaaactgtaccaatgctactagcaatagcagtataatagaggaaatgaaaaattgctctttcaatataaccacagaattaagagataagagagagaaaaagaatgcacttttttataaacttgatatagtacaactagatggcaactctagtcagtatagattaataaattgtaatacctcagtcataacacaagcctgtccaaaggtctcttttgacccaattcctatacattattgtgctccagctggttatgcgattctaaagtgtaataataagacattcactggaacaggaccgtgtaataatgtcagcacagtacaatgtacacatggaattaagccagtggtttcaactcaactattgttaaatggtagcctagcagaaggagagataataattagatctgaaaatataacaaacaatggcaaaacaataatagtacatctcaatgaatctgtaaagattgagtgtacgagacccaataataacacaagaacaagtataagaataggaccaggacaagcattttatgcaacaggacaagtaataggagacataagagaagcatattgtaacattagtgaaagtaaatggaatgaaactttacaaagggtaagtaaaaaattaaaagaatacttccctcataagaatataacatttcaaccatcctcaggaggggacctagaaattacaacacatagctttaattgtggaggagaatttttctattgcaatacatcaagcctgtttaataggacatatatggctaatagtacagatatggctaatagtacagaaactaacagtacacgaaccatcacaatccgctgcagaataaaacaaattataaacatgtggcaggaggtgggacgagcaatgtatgcccctcccattgcaggaaacataacatgtatatcaaatatcacaggactactattgacaagggatggaggaaaaaacaatacggatacggagacattcagacctggaggaggaaatatgaaggacaattggagaagtgaattatataaatataaagtggtagaagttaagccattaggagtagcacccactaatgcaagaaggagagtggtggagagagaaaaaagagcagtgggaatgggagctgtgttccttgggttcttgggagcggcaggaagcactatgggcgcagcatcaataacgctgacggtacaggccagacaattattgtctggtatagtgcaacagcaaagcaatttgctgaaggctatagaggctcaacagcatatgttgaaactcacggtctggggcattaaacagctccaggcaagagtcctggccttggaaagatacctaaaggatcaacagctcctagggatgtggggctgctctggaaaactcatctgcaccactaatgtatattggaactctagttggagtaataaaacttatggtgatatttgggataacatgacctggatgcagtgggagagagaaattagcaattatacagaaataatatatgaattgcttgaagaatcacaaaaccagcaggaaaagaatgaacaagatttactagcattggacagatggaacagtctgtggaattggtttaacataacaaattggctgtggtatataaaaatattcataatgatagtaggaggcttgataggtttaagaataatttttgctgtgctttctttagtaaatagagttaggcagggatactcacctctgtcgttgcagacccttatcccaagcccgaggggaccagacaggcccggaggaatcgaagaagaaggtggagagcaagacagaaacagatcaacgcgattagtgagcggattcttagcgcttgtctgggacgacctgcggagcctgtgccttttcatctaccaccgattgagagacttcatattaattgcagcgagagcgggggaacttctgggacgcagcagtctcaagggactacggagaggatgggaagcccttaagtatctgggaagtcttgtgcagtattggggcctggaactaaaaaggagtgctattagtctattggataccctagcaatagcaataggtgaaggaacagataggattctagaatttgtattaggaatttgtagagctatccgcaacatacctacaagaataagacagggctttgaaacagctttgctataa

SEQ ID NO: 14 - DNA, 2577 bp, Artificial Sequence
  Description of Artificial Sequence: Synthetic polynucleotide
atgagagtgatggggatacagaggaattatccacaatggtggatatggagcatgttaggcttttggatgctaatgatttgtaatgggatgtgggtcacagtctactatggggtacctgtgtggaaagaagcaaaaactactctattttgtgcatcagatgctaaagcatatgagaaagaagtgcataatgtctgggctacacatgcctgtgtacccacagaccccaatccacaagaaatggttttaaaaaatgtaacagaaaatttcaacatgtggaaaaatgacatggtggatcagatgcatgaagatgtaattagtttatgggatcaaagcctcaagccatgtgtaaagttgaccccactctgtgtcactctaaactgtaccaatgctactgccagcaatagcagtataaactgtaccaatgctactgccagcaatagcagtataatagagggaatgaaaaattgctctttcaatataaccacagaattaagagataagagagagaaaaagaatgcacttttttataaacttgatatagtacaactagatggcaactctagtcagtatagattaataaattgtaatacctcagtcataacacaagcctgtccaaaggtctcttttgacccaattcctatacattattgtgctccagctggttatgcgattctaaagtgtaataataagacattcactggaacaggaccgtgtaataatgtcagcacagtacaatgtacacatggaattaagccagtggtttcaactcaactattgttaaatggtagcctagcagaaggagagataataattagatctgaaaatataacaaacaatggcaaaacaataatagtacatctcaatgaatctgtaaagattgagtgtacgagacccaataataaaacaagaacaagtataagaataggaccaggacaagcattttatgcaacaggacaagtaataggagacataagagaagcatattgtaacattagtgaaagtaaatggaatgaaactttacaaagggtaagtaaaaaattaaaagaatacttccctcataagaatataacatttcaaccatcctcaggaggggacctagaaattacaacacatagctttaattgtggaggagaatttttctattgcaatacatcaagcctgtttaataggacatatatggctaatagtacagatatggctaatagtacagaaactaacagtacacgaaccatcacaatccgctgcagaataaaacaaattataaacatgtggcaggaggtgggacgagcaatgtatgcccctcccattgcaggaaacataacatgtatatcaaatatcacaggactactattgacaagggatggaggaaaaaacgatacggagacattcagacctggaggaggaaatatgaaggacaattggagaagtgaattatataaatataaagtggtagaagttaagccattaggagtagcacccactaatgcaagaaggagagtggtggagagagaaaaaagagcagtgggaatgggagctgtgttccttgggttcttgggagcggcaggaagcactatgggcgcagcatcaataacgctgacggtacaggccagacaattattgtctggtatagtgcaacagcaaagcaatttgctgaaggctatagaggctcaacagcatatgttgaaactcacggtctggggcattaaacagctccaggcaagagtcctggccttggaaagatacctaaaggatcaacagctcctagggatgtggggctgctctggaaaactcatctgcaccactaatgtatattggaactctagttggagtaataaaacttatggtgatatttgggataacatgacctggatgcagtgggagagagaaattagcaattatacagaaataatatatgaattgcttgaagaatcacaaaaccagcaggaaaagaatgaacaagatttactagcattggacagatggaacagtctgtggaattggtttaacataacaaattggctgtggtatataaaaatattcataatgatagtaggaggcttgataggtttaagaataatttttgctgtgctttctttagtaaatagagttaggcagggatactcacctctgtcgttgcagacccttatcccaagcccgaggggaccagacaggcccggaggaatcgaagaagaaggtggagagaaagacagaaacagatcaacgcgactagtgagcggattcttagcgcttgtctgggacgacctgcggagcctgtgccttttcatctaccaccgattgagagacttcatattaattgcagcgagagcgggggaacttctgggacgcagcagtctcaagggactacggagaggatgggaagcccttaagtatctgggaagtcttgtgcagtattggggcctggaactaaaaaggagtgctattagtctattggataccctagcaatagcagtaggtgaaggaacagataggattctagaatttgtattaggaatttgtagagctatccgcaacatacctacaagaataagacagggctttgaaacagctttgctataa

SEQ ID NO: 15 - DNA, 2556 bp, Artificial Sequence
  Description of Artificial Sequence: Synthetic polynucleotide
atgagagtgatggggatacaaaggaattatccacaatggtggatatggagcatgttaggcttttggatgctaatgatttgtaatgggatgtgggtcacagtctactatggggtacctgtgtggaaagaagcaaaaactactctattttgtgcatcagatgctaaagcatatgagaaagaagtgcataatgtctgggctacacatgcctgtgtacccacagaccccaatccacaagaaatggttttaaaaaatgtaacagaaaatttcaacatgtggaaaaatgacatggtggatcagatgcatgaagatgtaattagtttatgggatcaaagcctcaagccatgtgtaaagttgaccccactctgtgtcactctaaactgtaccactgccaatgctactgccagcaatagcagtataatagagggaatgaaaaattgctctttcaatataaccacagaattaagagataagagagagaaaaagaatgcacttttttataaacttgatatagtacaactagatggcaactctagtcagtatagattaataaattgtaatacctcagccataacacaagcctgtccaaaggtctcttttgacccaattcctatacattattgtgctccagctggttatgcgattctaaagtgtaataataagacattcaatggaacaggaccgtgtaataatgtcagcacagtacaatgtacacatggaattaagccagtggtttcaactcaactattgttaaatggtagcctagcagaaggagagataataattagatctgaaaatataacagacaatggcaaaacaataatagtacatctcaatgaatctgtaaagattgagtgtacgagacccagtaataacacaagaacaagtataagaataggaccaggacaagcattttatgcaacaggacaagtaataggagacataagagaagcacattgtaacattagtgaaagtaaatggaatgaaactttacaaagggtaagtaaaaaattaaaagaatacttccctcagaagaatataacatttcaaccatcctcaggaggggacctagaaattacaacacatagctttaattgtggaggagaatttttctattgcaatacatcaagcctgtttaataggacatatatggctactagtacagatatggctaatagtacagaaactaacagtacacgaatcatcacaatccgctgcagaataaaacaaattataaacatgtggcaggaggtgggacgagcaatgtatgcccctcccattgcaggaaacataacatgtatatcaaatatcacaggactactattgacaagggatgggggaaaaaacaatacggagacattcgagacattcagacctggaggaggaaatatgaaggacaattggagaagtgaattatataaatataaagtggtagaagttaagccattaggagtagcacccactaatgcaagaaggagagtggtggagagagaaaaaagagcagtgggaatgggagctgtgttccttgggttcttgggagcggcaggaagcactatgggcgcagcatcaataacgctgacggtacaggccagacaattattgtctggtatagtgcaacagcaaagcaatttgctgaaggctatagaggctcaacagcatatgttgaaactcacggtctggggcattaaacagctccaggcaagagtcctggccttggaaagatacctaaaggatcaacagctcctagggatgtggggctgctctggaaaactcatctgcaccactaatgtatattggaactctagttggagtaataaaacttatggtgatatttgggataacatgacctggatgcagtgggagagagaaattagcaattatacagaactaatatatgaattgcttgaagaatcacaaaaccagcaggaaaagaatgaacaagatttactagcattggacagatggaacagtctgtggaattggtttaacataacaaattggctgtggtatataaaaatattcataatgatagtaggaggcttgataggtttaagaataatttttgctgtgctttctttagtaaatagagttaggcagggatactcacctctgtcattgcagacccttatcccaagcccgaggggaccagacaggcccggaggaatcgaagaagaaggtggagagcaagacagaaacagatcaacgcgattagtgagcggattcttagcgcttgcctgggacgacctgcggagcctgtgccttttcatctaccaccgattgagagacttcatattaattgcagcgagagcgggggaacttctgggacgcagcagtctcaagggactacggagaggatgggaagcccttaagtatctgggaagtcttgtgcagtattggggcctggaactaaaaaggagtgctattagtctattggataccctagcaatagcagtaggtgaaggaacagataggattctagaatttgtattaggaatttgtagagctatccgcaacatacctacaagaataagacagggctttgaaacagctttgctataa

SEQ ID NO: 16 - DNA, 2580 bp, Artificial Sequence
  Description of Artificial Sequence: Synthetic polynucleotide
atgagagtgatggggatacagaggaattatccacaatggtggatatggagcatgttaggcttttggatgctaatgatttgtaatgggatgtgggtcacagtctactatggggtacctgtgtggaaagaagcaaaaactactctattttgtgcatcagatgctaaagcatatgagaaagaagtgcataatgtctgggctacacatgcctgtgtacccacagaccccaatccacaagaaatggttttaaaaaatgtaacagaaaatttcaacatgtggaaaaatgacatggtggatcagatgcatgaagatgtaattagtttatgggatcaaagcctcaagccatgtgtaaagttgaccccactctgtgtcactctaaactgtatcaatgctaatgctactgccagcaatagcagtataatagagggaatgaatagcagtataatagagggaatgaaaaattgctctttcaatataaccacagaattaagagataagagagagaaaaagaatgcacttttttataaacttgatatagtacaactagatggcaactctagtcagtatagattaataaattgtaatacctcagtcataacacaagcctgtccaaaggtctcttttgacccaattcctatacattattgtgctccagctggttatgcgattctaaagtgtaataataagacattcaatggaacaggaccgtgtaataatgtcagcacagtacaatgtacacatggaattaagccagtggtttcaactcaactattgttaaatggtagcctagcagaaggagagataataattagatctgaaaacataacagacaatggcaaaacaataatagtacatctcaatgaatctgtaaagattgagtgtacgagacccagtaataacacaagaacaagtataagaataggaccaggacaagcattttatgcaacaggacaagtaataggagacataagagaagcacattgtaacattagtgaaagtaaatggaatgaaactttacaaagggtaagtgaaaaattaaaagaatacttccctcataagaatataacatttcaaccatcctcaggaggggacctagaaattacaacacatagctttaattgtggaggagaatttttctattgcaatacatcaagcctgtttaataggacatatatggctactagtacagatatggctaatagtacagaaactaacagtacacgaatcatcacaatccgctgcagaataaaacaaattataaacatgtggcaggaggtgggacgagcaatgtatgcccctcccattgcaggaaacataacatgtatatcaaatatcacaggactactattgacaagggatggaggaaaaaacaatacggagacattcgagacattcagacctggaggaggaaatatgaaggacaattggagaagtgaattatataaatataaagtggtagaagttaagccattaggagtagcacccactaatgcaagaaggagagtggtggagagagaaaaaagagcagtgggaatgggagctgtgttccttgggttcttgggagcggcaggaagcactatgggcgcagcatcaataacgctgacggtacaggccagacaattattgtctggtatagtgcaacagcaaagcaatttgctgaaggctatagaggctcaacagcatatgttgaaactcacggtctggggcattaaacagctccaggcaagagtcctggccttggaaagatacctaaaggatcaacagctcctagggatgtggggctgctctggaaaactcatctgcaccactaatgtatattggaactctagttggagtaataaaacttatggtgatatttgggataacatgacctggatgcagtgggagagagaaattagcaattatacagaaataatatatgaattgcttgaagaatcacaaaaccagcaggaaaagaatgaacaagatttactagcattggacagatggaacagtctgtggaattggtttaacataacaaattggctgtggtatataaaaatattcataatgatagtaggaggcttgataggtttaagaataatttttgctgtgctttctttagtaaatagagttaggcagggatactcacctctgtcgttacagacccttatcccaagcccgaggggaccagacaggcccggaggaatcgaagaagaaggtggagagcaagacagaaacagatcaacgcgattagtgagcggattcttagcgcttgcctgggacgacctgcggagcctgtgccttttcatctaccaccgattgagagacttcatattaattgcagcgagagcgggggaacttctgggacgcagcagtctcaagggactacggagagggtgggaagcccttaagtatctgggaagtcttgtgcagtattggggcctggaactaaaaaggagtgctattagtctattggataccctagcaatagcagtaggtgaaggaacagataggattctagaatttgtattaggaatttgtagagctatccgcaacatacctacaagaataagacagggctttgaaacagctttgctataa

SEQ ID NO: 17 - DNA, 2568 bp, Artificial Sequence
  Description of Artificial Sequence: Synthetic polynucleotide
atgagagtgatggggatacagaggaattatccacaatggtggatatggagcatgttaggcttttggatgctaatgatttgtaatgggatgtgggtcacagtctactatggggtacctgtgtggaaagaagcaaaaactactctattttgtgcatcagatgctaaagcatatgagaaagaagtgcataatgtctgggctacacatgcctgtgtacccacagaccccaatccacaagaaatggttttaaaaaatgtaacagaaaatttcaacatgtggaaaaatgacatggtagatcagatgcatgaagatgtaattagtttatgggatcaaagcctcacgccatgtgtaaagttgaccccactctgtgtcactctaaactgtaccgatgctactgccagcaatgctactgccagcaatgctactgccagcaatgctactgccagcagtagcagtataatagaggaaatgaaaaattgctctttcaatataaccacagaattaagagataagagagagaaaaagaatgcacttttttataaacttgatatagtacaactagatggcaactctagtcagtatagattaataaattgtaatacctcagtcataacacaagcctgtccaaaggtctcttttgacccaattcctatacattattgtgctccagctggttatgcgattctaaagtgtaataataagacattcaatggaacaggaccgtgtaataatgtcagcacagtacaatgtacacatggaattaagccagtggtttcaactcaactattgttaaatggtagcctagcagaaggagagataataattagatctgaaaatataacagacaatggcaaaacaataatagtacatctcaatgaatctgtaaagattgagtgtacgagacccagtaataacacaagaacaagtataagaataggaccaggacaagcattttatgcaacaggacaagtaataggagacataagagaagcacattgtaacattagtgaaagtaaatggaatgaaactttacaaagggtaagtaaaaaattaaaagaatacttccctcataagaatataacatttcaaccatcctcaggaggggacccagaaattacaacacatagctttaattgtggaggagaatttttctattgcaatacatcaagcctgtttgataggacatatatggctaatagtacagaaactaacagtacacgaatcatcacaatccgctgcagaataaaacaaattataaacatgtggcaggaggtgggacgagcaatgtatgcccctcccattgcaggaaacataacatgtatatcaaatatcacaggactactattgacaagggatggaggaaacagcagtacggagacattcagacctggaggaggaaatatgaaggacaattggagaagtgaattatataaatataaagtggtagaagttaagccattaggagtagcacccactaatgcaagaaggagagtggtggagagagaaaaaagagcagtgggaatgggagctgtgttccttgggttcttgggagcggcaggaagcactatgggcgcagcatcaataacgctgacggtacaggccagacaattattgtctggtatagtgcaacagcaaagcaatttgctgaaggctatagaggctcaacagcatatgttgaaactcacggtctggggcattaaacagctccaggcaagagtcctggccttggaaagatacctaaaggatcaacagctcctagggatgtggggctgctctggaaaactcatctgcaccactaatgtatattggaactctagttggagtaataaaacttatggtgatatttgggataacatgacctggatgcagtgggagagagaaattagcaattatacagacataatatatgaattgcttgaagaatcacaaaaccagcaggaaaagaatgaacaagatttactagcattggacagatggaacagtctgtggaattggtttaacataacaaagtggctgtggtatataaaaatattcataatgatagtaggaggcttgataggtttaagaataatttttgctgtgctttctttagtaaatagagttaggcagggatactcacctctgtcattgcagacccttatcccaagcccgaggggaccagacaggcccggaggaatcgaagaagaaggtggagagcaagacagaaacagatcaacgcgattagtgagcggattcttagcgtttgcctgggacgacctgcggagcctgtgccttttcatctaccaccgattgagagacttcatattaattgcagcgagagcgggggaacttctgggacgcagcagtctcaagggactacggaggggatgggaagcccttaagtatttgggaggtcttgtgcagtattggggcctggaactaaaaaagagtgctattagtctattggataccctagcaatagcagtaggtgaaggaacagataggattctagaatttgtattaggaatttgtagagctatccgcaacatacctacaagaacaagacagggctttgaaacagctttgctataa

SEQ ID NO: 18 - DNA, 2589 bp, Artificial Sequence
  Description of Artificial Sequence: Synthetic polynucleotide
atgagagtgatggggagacagaggaattatccacaatggtggatatggagcatgttaggcttgtggatgctaatgatttgtaatgggatgtgggtcacagtctactatggggtacctgtgtggaaagaagcaaaaactactctattttgtgcatcagatgctaaagcatatgagaaagaagtgcataatgtctgggctacacatgcctgtgtacccacagaccccaatccacaagaaatggttttaaaaaatgtaacagaaaatttcaacatgtggaaaaatgacatggtagatcagatgcatgaagatgtaattagtttatgggatcaaagcctcacgccatgtgtaaagttgaccccactctgtgtcactctaaactgtaccgatgctactgccagcaatgctactgccagcaatgctactgccagcaatgctactgccagcaatagcagtataataatagagggaatgaaaaattgctctttcaatataaccacagaattaagagataagagagagaaaaagaatgcacttttttataaacttgatatagtacaactagatggcaactctagtcagtatagattaataaattgtaatacctcagtcataacacaagcctgtccgaaggtctcttttgacccaattcctatacattattgtgctccagctggttatgcgattctaaagtgtaataataagacattcaatggaacaggaccgtgtaataatgtcagcacagtacaatgtacacatggaattaagccagtggtttcaactcaactattgttaaatggtagcctagcagaaggagagataataattagatctaaaaatataacagacaatggcaaaacaataatagtacatctcaatgaatctgtaaagattgagtgtacgagacccagtaataacacaagaacaagtataagaataggaccaggacaagcattttatgcaacaggacaagtaataggagacataagagaagcacattgtaacattagtgaaagtaaatggaatgaaactttacaaagggtaagtgaaaaattaaaagaatacttccctaataagaatataacatttcaaccatcctcaggaggggacctagaaattacaacacatagctttaattgtggaggagaatttttctattgcaatacatcaagcctgtttaataggacatatatgtttaatagtacagatatggctaatagtacagaaactaacagtacacgaatcatcacaatccgctgcagaataaaacaaattataaacatgtggcaggaggtgggacgagcaatgtatgcccctcccattgcaggaaacataacatgtatatcaaatatcacaggactactattgacaagggatggaggaaacagcagtacggagacattcagacctggaggaggaaatatgaaggacaattggagaagtgaattatataaatataaagtggtagaagttaagccattaggagtagcacccactaatgcaagaaggagagtggtggagagagaaaaaagagcagtgggaatgggagctgtgttccttgggttcttgggagcggcaggaagcactatgggcgcagcatcaataacgctgacggtacaggccagacaattattgtctggtatagtgcaacagcaaagcaatttgctgaaggctatagaggctcaacagcatatgttgaaactcacggtctggggcattaaacagctccaggcaagagtcctggccttggaaagatacctaaaggatcaacagctcctagggatgtggggctgctctggaaaactcatctgcaccactaatgtatattggaactctagttggagtaataaaacttatggtgatatttgggataacatgacctggatgcagtgggagggagaaattagcaattatacagaaataatatataaattgcttgaagaatcacaaaaccagcaggaaaagaatgaacaagatttattagcattggacagatggaacagtctgtggaattggtttaacataacaaattggctgtggtatataaaaatattcataatgatagtaggaggcttgataggtttaagaataatttttgctgtgctttctttagtaaatagagttaggcagggatactcacctctgtcgttgcagacccttatcccaagcccgaggggaccagacaggcccggaggaatcgaagaagaaggtggagagcaagacagaaagagatcaacgcgattagtgagcggattcttagcgcttgcctgggacgacctgcggagcctgtgccttttcatctaccaccgattgagagacttcatattaattgcagcgagagcaggggaacttctgggacgcagcagtctcaagggactacggagaggatgggaagcccttaagtatctgggaagtcttgtgcagtattggggccgggaactaaaaaggagtgctattagtctattggataccctagcaatagcagtaggtgaaggaacagataggattctagaatttgcattaggaatttgtagagctatccgcaacatacctacaagaataagacagggctttgaaacagctttgctataa

SEQ ID NO: 19 - DNA, 2586 bp, Artificial Sequence
  Description of Artificial Sequence: Synthetic polynucleotide
atgagagtgatggggatacagaggaattatccacaatggtggatatggagcatgttaggcttgtggatgctaatgatttgtaatgggatgtgggtcacagtctactatggggtacctgtgtggaaagaagcaaaaactactctattttgtgcatcagatgctaaagcatatgagaaagaagtgcataatgtctgggctacacatgcctgtgtacccacagaccccaatccacaagaaatggttttaaaaaatgtaacagaaaatttcaacatgtggaaaaatgacatggtagatcagatgcatgaagatgtaattagtttatgggatcaaagcctcaagccatgtgtaaagttgaccccactctgtgtcactctaaactgtgccgatgctactaccaatgctactgccagcaatgctactgccagcaatgctactgccagcaatagcagtataatagagggaatgaaaaattgctctttcaatataaccacagaattaagagataagagagagaaaaagaatgcacttttttataaacttgatatagtacaactagatggcaactctagtcagtatagattaataaattgtaatacctcagtcataacacaagcctgtccaaaggtctcttttgacccaattcctatacattattgtgctccagctggttatgcgattctaaagtgtaataataagacattcaatggaacaggaccgtgtaataatgtcagcacagtacaatgtacacatggaattaagccagtggtttcaactcaactattgttaaatggtagcctagcagaaggagagataataattagatctgaaaacataacagacaatggcaaaacaataatagtacatctcaatgaatctgtaaagattgagtgtacgagacccagtaataacacaagaacaagtataagaataggaccagggcaagcattttatgcaacaggacaagtaataggagacataagagaagcacattgtaacattagtgaaagtaaatggaatgaaactttacaaagggtaagtaaaaaattaaaagaatacttccctcttaagaatataacatttcaaccatcctcaggaggggacctagaaattacaacacatagctttaattgtggaggagaatttttctattgcaatacatcaagcctgtttaataggacatatatggctaatagtacagatatggctaatagtacagaaactaacagtacacgaatcatcacaatccgctgcagaataaaacaaattataaacatgtggcaggaggtgggacgagcaatgtatgcccctcccattgcaggaaacataacatgtatatcaaatatcacaggactactattgacaagggatggaggaaacaatacgaatacggagacattcagacctggaggaggaaatatgaaggacaattggagaagtgaattatataaatataaggtggtagaagttaagccattaggagtagcacccactaatgcaagaaggagagtggtggagagagaaaaaagagcagtgggaatgggagctgtgttccttgggttcttgggagcggcaggaagcactatgggcgcagcatcaataacgctgacggtacaggccagacaattattgtctggtatagtgcaacagcaaagcaatttgctgaaggctatagaggctcaacagcatatgttgaaactcacggtctggggcattaaacagctccaggcaagagtcctggccttggaaagatacctaaaggatcaacagctcctagggatgtggggctgctctggaaaactcatctgcaccactaatgtatattggaactctagttggagtaataaaacttatggtgatatttgggataacatgacctggatgcagtgggagagagaaattagcaattatacagaactaatatatgaattgcttgaagaatcacaaaaccagcaggaaaagaatgaacaagatttactagcattggacagatggaacagtctgtggaattggtttaacataacaaattggctgtggtatataaaaatattcataatgatagtaggaggcttgataggtttaagaataatttttgctgtgctttctttagtaaatagagttaggcagggatactcacctctgtcgttgcagacccttatcccaagcccgaggggaccagacaggcccggaggaatcgaagaagaaggtggagagcaagacagaaacagatcaacgcgattagtgagcggattcttagcgcttgcctgggacgacctgcggagcctgtgccttttcatctaccaccgattgagagacttcatattaattgcagcgagagcgggggaacttctgggacgcagcagtctcaagggactacggagaggatgggaagcccttaagtatctgggaggtcttgtgcagtattggggcctggaactaaaaaggagtgctattagtctattggataccctagcaatagcagtaggtgaaggaacagataggattctagaatttgtattaggaatttgtagagctatccgcaacatacctacaagaataagacagggctttgaaacagctttgctataa

SEQ ID NO: 20 - DNA, 2571 bp, Artificial Sequence
  Description of Artificial Sequence: Synthetic polynucleotide
atgagagtgatggggatacagaggaattatccacaatggtggatatggagcatgttaggcttgtggatgctaatgatttgtaatgggatgtgggtcacagtctactatggggtacctgtgtggaaagaagcaaaaactactctattttgtgcatcagatgctaaagcatatgagaaagaagtgcataatgtctgggctacacatgcctgtgtacccacagaccccaatccacaagaaatggttttaaaaaatgtaacagaaaatttcaacatgtggaaaaatgacatggcggatcagatgcatgaagatgtaattagtttatgggatcaaagcctcaagccatgtgtaaagttgaccccactctgtgtcactctaaactgtaccgatgctaatgctactgccagcaataccaatgctactgccagcaatatcaatgctactgccagcgatagcagtataatagagggaatgaaaaattgctctttcaatataaccacagaattaagagataagagagagaaaaagtatgcacttttttataaacttgatatagtacaactagatggcaactctagtcagtatagattaataaattgtaatacctcagtcataacacaagcctgtccaaaggtctcttttgacccaattcctatacattattgtgctccagctggttatgcgattctaaagtgtaataataagacattcaatggaacaggaccgtgtaataatgtcagcacagtacaatgtacacatggaattaagccagtggtttcaactcaactattgttaaatggtagcctagcagaaggagagataataattagatctgaaaatataacaaacagtgccaaaacaataatagtacatctcaatgaatctgtaaagattgagtgtacgagacccagtaataacacaagaacaagtataagaataggaccaggacaagcattttatgcaacaggacaagtaataggagacataagaaaagcacattgtaacattagtgaaagtaaatggaatgaaactttacaaagggtaagtaaaaaattaaaagaatacttccctcataagaatataacatttcaaccatcctcaggaggggacctagaagttacaacacatagttttaattgtggaggagaatttttctattgcaatacatcaagcctgtttaataggacatacatggctaatagtacagaaactaacagtacacgaaccatcacactccactgcagaataaaacaaattataaacatgtggcaggaggtgggacgagcaatgtatgcccctcccattgcaggaaacataacatgtatatcaaatatcacaggactactattgacaagggatggaggaaataacaatacggagacattcagacctggaggaggaaatatgaaggacaattggagaagtgaattatataaatataaagtggtagaagttaagccattaggagtagcacccactaatgcaagaaggagagtggtggagagagaaaaaagagcagtgggaatgggagctgtgttccttgggttcttgggagcggcaggaagcactatgggcgcagcatcaataacgctgacggtacaggccagacaattattgtctggtatagtgcaacagcaaagcaatttgctgaaggctatagaggctcaacagcatatgttgaaactcacggtctggggcattaaacagctccaggcaagagtcctggccttggaaagatacctaaaggatcaacagctcctagggatgtggggctgctctggaaaactcatctgcaccactaatgtatattggaactctagttggagtaataaaacttatggtgatatttgggataacatgacctggatgcagtgggagagagaaattagcaattatacagaaataatatatgacttgcttgaagaatcacaaaaccagcaggaaaagaatgaacaagatttactagcattggacagatggaacagtctgtggaattggtttaacataacaaaatggctgtggtatataaaaatattcataatgatagtaggaggcttgataggtttaagaataatttttgctgtgctttctttagtaaatagagttaggcagggatactcacctctgtcgttgcagacccttatcccaagcccgaggggaccagacaggcccggaggaatcgaagaagaaggtggagagcaagacagaaacagatcaacgcgattagtgagcggattcttagcgcttgcctgggacgacctgcggagcctgtgccttttcatctaccaccgattgagagacttcatattaattgcagcgagagcgggggaacttctgggacgcagcagtctcaagggactacggaggggatgggaagcccttaagtatctgggaagtcttgtgcagtattggggcctggaactaaaaaggagtgctattagtctattggataccctagcaatagcagtaggtgaaggaacagataggattctagaatttgtattaggaatttgtagagctatccgcaacatacctacaagaataagacagggctttgaaacagctttgctataa

SEQ ID NO: 21 - DNA, 2556 bp, Artificial Sequence
  Description of Artificial Sequence: Synthetic polynucleotide
atgagagtgagggggatacagaggaattatccacaatggtggatatggagcatgttaggcttttggatgctaatgatttgtaatgggatgtgggtcacagtctactatggggtacctgtgtggaaagaagcaaaaactactctattttgtgcatcagatgctaaagcatatgagaaagaagtgcataatgtctgggctacacatgcctgtgtacccacagaccccaatccacaagaaatggttttaaaaaatgtaacagaaaatttcaacatgtggaaaaatgacatggtggatcagatgcatgaagatgtaattagtttatgggatcaaagcctcaagccatgtgtaaagttgaccccactctgtgtcactctaagctgtaccaatgctactaatgctactgccagcaatagcagtatattagagggaatgaaaaattgctctttcaatataaccacagaattaagagataagagagagaaaaagaatgcacttttttataaacttgatatagtacaactagatggcaactctagtcagtatagattaataaattgtaatacctcagtcataacacaagcctgtccaaaggtctcttttgacccaattcctatacattattgtgctccagctggttatgcgattctaaagtgtaataataagacattcaatggaacaggaccgtgtaataatgtcagcacagtacaatgtacacatggaattaagccagtggtttcaactcaactattgttaaatggtagcctagcagaaggagagataataattagatctaaaaacataacagacaatggcaaaacaataatagtacatctcaatgaatctgtaaagattgagtgtacgagacccagtaataacacaagaacaagtataagaataggaccaggacaagcattttatgcaacaggacaagtaataggagacataagagaagcacattgtaacattagtgaaagtaaatggaatgaaactttacaaagggtaagtgaaaaattaaaagaatacttccctcataagaatataacatttcaaccatcctcaggaggggacctagaaattacaacacatagctttaattgtggaggagaatttttctattgcaatacatcaagcctgtttaataggacatatatggctactagtacagatatggctaatagtacagaaactaacagtacacgaatcatcacaatccgctgcagaataaaacaaattataaacatgtggcaggaggtgggacgagcaatgtatgcccctcccattgcaggaaacataacatgtatatcaaatatcacaggactactattgacaagggatggaggaaaaaacgatacggatacggagacattcagacctgaaggaggaaatatgaaggacaattggagaagtgaattatataaatataaagtggtagaagttaagccattaggagtagcacccactaatgcaagaaggagagtggtggagagagaaaaaagagcagtgggaatgggagctgtgttccttgggttcttgggagcggcaggaagcactatgggcgcagcatcaataacgctgacggtacaggccagacaattattgtctggtatagtgcaacagcaaagcaatttgctgaaggctatagaggctcaacagcatatgttgaaactcacggtctggggcattaaacagctccaggcaagagtcctggccttggaaagatacctaaaggatcaacagctcctagggatgtggggctgctctggaaaactcatctgcaccactaatgtatattggaactctagttggagtaataaaacttatggtgatatttgggataacatgacctggatgcagtgggagagagaaattagcaattatacagaactaatatatgaattgcttgaagaatcacaaaaccagcaggaaaagaatgaacaagatttactagcattggacagatggaacagtctgtggaattggtttaacataacaaattggctgtggtatataaaaatattcataatgatagtaggaggcttgataggtttaagaataatttttgctgtgctttctttagtaaatagagttaggcagggatactcacctctgtcattgcagacccttatcccaagcccgaggggaccagacaggcccggaggaatcgaagaagaaggtggagagcaagacagaaacagatcaacgcgattagtgagcggattcttagcgcttgcctgggacgacctgcggagcctgtgccttttcatctaccaccgattgagagacttcatattaattgcagcgagagcgggggaacttctgggacgcagcagtctcaagggactacggagagggtgggaagcccttaagtatctgggaagtcttgtgcagtattggggcctggaactaaaaaggagtgctattagtctattggataccctagcaatagcagtaggtgaaggaacagataggattctagaatttgtattaggaatttgtagagctatccgcaacatacctacaagaataagacagggctttgaaacagctttgctataa

SEQ ID NO: 22 - DNA, 2556 bp, Artificial Sequence
  Description of Artificial Sequence: Synthetic polynucleotide
atgagagtgagggggatacagaggaattatccacaatggtggatatggagcatgttaggcttttggatgctaatgatttgtaatgggatgtgggtcacagtctactatggggtacctgtgtggaaagaagcaaaaactactctattttgtgcatcagatgctaaagcatatgagaaagaagtgcataatgtctgggctacacatgcctgtgtacccacagaccccaatccacaagaaatggttttaaaaaatgtaacagaaaatttcaacatgtggaaaaatgacatggtggatcagatgcatgaagatgtaattagtttatgggatcaaagcctcaagccatgtgtaaagttgaccccactctgtgtcactctaaactgtatcaatgctactaatgctactgccagcaatagcagtatattagagggaatgaaaaattgctctttcaatataaccacagaattaagagataagagagagaaaaagaatgcacttttttataaacttgatatagtacaactagatggcaactctagtcagtatagattaataaattgtaatacctcagtcataacacaagcctgtccaaaggtctcttttgacccaattcctatacattattgtgctccagctggttatgcgattctaaagtgtaataataagacattcaatggaacaggaccgtgtaataatgtcagcacagtacaatgtacacatggaattaagccagtggtttcaactcaactattgttaaatggtagcctagcagaaggagagataataattagatctaaaaatataacagacaatggcaaaacaataatagtacatctcaatgaatctgtaaagattgagtgtacgagacccagtaataacacaagaacaagtataagaataggaccaggacaagcattttatgcaacaggacaagtaataggaaatataagagaagcacattgtaacattagtgaaagtaaatggaatgaaactttacaaagggtaagtgaaaaattaaaagaatacttccctcacaagaatataacatttcaaccatcctcaggaggggacctagaaattacaacacatagctttaattgtagaggagaatttttctattgcaatacatcaagcctgtttaataggacatatatggctactagtacagatatggctaatagtacagaaactaacagtacacgaatcatcacaatccgctgcagaataaaacaaattataaacatgtggcaggaggtgggacgagcaatgtatgcccctcccattgcaggaaacataacatgtatatcaaatatcacaggactactattgacaagggatgggggagaaaacgatacggatacggagacattcagacctgaaggaggaaatatgaaggacaattggagaagtgaattatataaatataaagtggtagaagttaagccattaggagtagcacccactaatgcaagaaggagagtggtggagagagaaaaaagagcagtgggaatgggagctgtgttccttgggttcttgggagcggcaggaagcactatgggcgcagcatcaataacgctgacggtacaggccagacaattattgtctggtatagtgcaacagcaaagcaatttgctgaaggctatagaggctcaacagcatatgttgaaactcacggtctggggcattaaacagctccaggcaagagtcctggccttggaaagatacctaaaggatcaacagctcctagggatgtggggctgctctggaaaactcatctgcaccactaatgtatattggaactctagttggagtaataaaacttatagtgatatttgggataacatgacctggatgcagtgggagagagaaattagcaattatacagaactaatatatgaattgcttgaagaatcacaaaaccagcaggaaaagaatgaacaagatttactagcattggacagatggaacagtctgtggaattggtttaacataacaaattggctgtggtatataaaaatattcataatgatagtaggaggcttgataggtttaagaataatttttgctgtgctttctttagtaaatagagttaggcagggatactcacctctgtcattgcagacccttatcccaagcccgaggggaccagacaggcccggaggaatcgaagaagaaggtggagagcaagacagaaacagatcaacgcgattagtgagcggattcttagcgcttgtctgggacgacctgcggagcctgtgccttttcatctaccaccgattgagagacttcatattaattgcagcgagagcgggggaacttctgggacgcagcagtctcaagggactacggagagggtgggaagcccttaagtatctgggaagtcttgtgcagtattggggcctggaactaaaaaggagtgctattagtctattggataccctagcaatagcagtaggtgaaggaacagataggattctagaatttgtattaggaatttgtagagctatccgcaacatacctacaagaataagacagggctttgaaacagctttgctataa

SEQ ID NO: 23 - DNA, 2556 bp, Artificial Sequence
  Description of Artificial Sequence: Synthetic polynucleotide
atgagagtgatggggagacagaggaattatccacaatggtggatatggagcatgttaggcttgtggatgctaatgatttgtaatgggatgtgggtcacagtctactatggggtacctgtgtggaaagaagcaaaaactactctattttgtgcatcagatgctaaagcatatgagaaagaagtgcataatgtctgggctacacatgcctgtgtacccacagaccccaatccacaagaaatggttttaaaaaatgtaacagaaaattttaacatgtggaaaaatgacatggtggatcagatgcatgaagatgtaattagtttatgggatcaaagcctcaagccatgtgtaaagttgaccccactctgtgtcactctaaactgtatcaatgctactaatgctactgccagcaatagcagtatattagagggaatgaaaaattgctctttcaatataaccacagaattaagagataagagagagaaaaagaatgcacttttttataaacttgatatagtacaactagatggcaactctagtcagtatagattaataaattgtaatacctcagtcataacacaagcctgtccaaaggtctcttttgacccaattccaatacattattgtgctccagctggttatgcgattctaaagtgtaataataagacattcaatggaacaggaccgtgtaataatgtcagcacagtacaatgtacacatggaattaagccagtggtttcaactcaactattgttaaatggtagcctagcagaaggagagataataattagatctaaaaatataacagacaatggcaaaacaataatagtacatctcaatgaatctgtaaagattgagtgtacgagacccagtaataacacaagaacaagtataagaataggaccaggacaagcattttatgcaacaggacaagtaataggagacataagagaagcacattgtaacattagtgaaagtaaatggaatgaaactttacaaagggtaagtaaaaaattaaaagaatacttccctgataagaatataacatttcaaccatcctcaggaggggacctagaaattacaacacatagctttaattgtggaggagaatttttctattgcaatacatcaagcctgtttaataggacatatatggttaatagtacagatatggctaatagtacagaaactaacagtacacgaaccatcacaatcagctgcagaataaaacaaattataaacatgtggcaggaggtgggacgagcaatgtatgcccctcccattgcaggaaacataacatgtatatcaaatatcacaggactactattgacaagggatggaggaaaaaacgatacggatacggagacattcagacctgaaggaggaaatatgaaggacaattggagaagtgaattatataaatataaagtggtagaagttaagccattaggagtagcacccactaatgcaagaaggagagtggtggagagagaaaaaagagcagtgggaatgggagctgtgttccttgggttcttgggagcggcaggaagcactatgggcgcagcatcaataacgctgacggtacaggccagacaattattgtctggtatagtgcaacagcaaagcaatttgctgaaggctatagaggctcaacagcatatgttgaaactcacggtctggggcattaaacagctccaggcaagagtcctggccttggaaagatacctaaaggatcaacagctcctagggatgtggggctgctctggaaaactcatctgcaccactaatgtatattggaactctagttggagtaataaaacttatggtgatatttgggataacatgacctggatgcagtgggagagagaaattagcaattatacagaactaatatatgaattgcttgaagaatcacaaaaccagcaggaaaagaatgaacaagatttactagcattggacagatggaacagtctgtggaattggtttaacataacaaattggctgtggtatataaaaatattcataatgatagtaggaggcttgataggtttaagaataatttttgctgtgctttctttagtaaatagagttaggcagggatactcacctctgtcattgcagacccttatcccaagcccgaggggaccagacaggcccggaggaatcgaagaagaaggtggagagcaagacagaaacagatcaacgcgattagtgagcggattcttagcgcttgcctgggacgacctgcggagcctgtgccttttcatctaccaccgattgagagacttcatattaattgcagcgagagcgggggaacttctgggacgcagcagtctcaagggactacggagagggtgggaagcccttaagtatctgggaagtcttgtgcagtattggggcctggaactaaaaaggagtgctattagtctattggataccctagcaatagcagtaggtgaaggaacagataggattctagaatttgtattaggaatttgtagagctatccgcaacatacctacaagaataagacagggctttgaaacagctttgctataa

SEQ ID NO: 24 - DNA, 2571 bp, Artificial Sequence
  Description of Artificial Sequence: Synthetic polynucleotide
atgagagtgatggggatacagaggaattatccacaatggtggatatggagcatgttaggcttttggatgctaatgatttgtaatgggatgtgggtcacagtctactatggggtacctgtgtggaaagaagcaaaaactactctattttgtgcatcagatgctaaagcatatgagaaagaagtgcataatgtctgggctacacatgcctgtgtacccacagaccccaatccacaagaaatggttttaaaaaatgtaacagaaaatttcaacatgtggaaaaatgacatggcggatcagatgcatgaagatgtaattagtttatgggatcaaagcctcaagccatgtgtaaagttgaccccactctgtgtcactctaaactgtaccgatgctaatgctactgccagcaatatcaatgctactgccagcaagagcagtataatagaggaaatgaaaaattgctctttcaatataaccacagaattaagagataagagagagaaaaagtatgcacttttttataaacttgatatagtacaactagatggcaactctagtcagtatagattaataaattgtaatacctcagtcataacccaagcctgtccaaaggtctcttttgacccaattcctatacattattgtgctccagctggttatgcgattctaaagtgtaataataagacattcaatggaacaggaccgtgtaataatgtcagcacagtacaatgtacacatggaattaagccagtggtttcaactcaactattgttaaatggtagcctagcagaaggagagataataattagatctgaaaatataacagacaatagcaaaacaataatagtacatctcaatgaatctgtaaagattgagtgtacaagacccagtaataacacaagaacaagtataagaataggaccaggacaagcattttatgcaacaggacaagtaataggagacataagagaagcacattgtaacattagtgaaagtaaatggaatgaaactttacaaagggtaagtaaaaaattaaaagaatacttccctgataagaatataacatttcaaccatcctcaggaggggacccagaaattacaacacatagctttaattgtggaggagaatttttctattgcaatacatcaagcctgtttaataggacatacatggctaatagtacagaaactaacagtacacgaaccatcacactccactgcagaataaaacaaattataaacatgtggcaggaggtgggacgagcaatgtatgcccctcccattgcaggaaacataacatgtatatcaaatatcacaggactactattgacaagggatggaggagaaaacacaagggatggaggaaataacaatacggagacattcagacctgaaggaggaaatatgaaggacaattggagaagtgaattatataaatataaagtggtagaagttaagccattaggagtagcacccactaaggcaagaaggagagtggtggagagagaaaaaagagcagtgggaatgggagctgtgttccttgggttcttgggagcggcaggaagcactatgggcgcagcatcaataacgctgacggtacaggccagacaattattgtctggtatagtgcaacagcaaagcaatttgctgaaggctatagaggctcaacagcatatgttgaaactcacggtctggggcattaaacagctccaggcaagagtcctggccttggaaagatacctaaaggatcaacagctcctagggatgtggggctgctctggaaaactcatctgcaccactaatgtatattggaactctagttggagtaataaaacttatggtgatatttgggataacatgacctggatgcagtgggagagagaaattagcaattatacagacataatatatgaattgcttgaagaatcacaaaaccagcaggaaaagaatgaacaagatttactagcattggacagatggaacagtctgtggaattggtttaacataacaaattggctgtggtatataaaaatattcataatgatagtaggaggcttgataggtttaagaataatttttgctgtgctttctttagtaaatagagttaggcagggatactcacctctgtcattgcagacccttatcccaagcccgaggggaccagacaggcccggaggaatcgaagaagaaggtggagagcaagacagaaacagatcaacgcgattagtgagcggattcttagcgcttgcctgggacgacctgcggagcctgtgccttttcatctaccaccgattgagagacttcatattaattgcagcgagagcgggggaacttctgggacgcagcagtctcaagggactacggagagggtgggaagcccttaagtatctgggaagtcttgtgcagtattggggcctggaactaaaaaggagtgctattagtctattggataccctagcaatagcagtaggtgaaggaacagataggattctagaatttgtattaggaatttgtagagctatccgcaacatacctacaagaataagacagggctttgaaacagctttgctataa

SEQ ID NO: 25 - DNA, 2574 bp, Artificial Sequence
  Description of Artificial Sequence: Synthetic polynucleotide
atgagagtgacggggatacagaggaattatccacaatggtggatatggagcatgttaggcttgtggatgctaatgatttgtaatgggatgtgggtcacagtctactatggggtacctgtgtggaaagaagcaaaaactactctattttgtgcatcagatgctaaaggatatgagaaggaagtgcataatgtctgggctacacatgcctgtgtacccacagaccccaatccacaagaaatggttttaaaaaatgtaacagaaaattttaacatgtggaaaaatgacatggtggatcagatgcatgaagatgtaattagtttatgggatcaaagcctcaagccatgtgtaaagttgaccccactctgtgtcactctatactgtaccaatgctactgctaatgctactgccagcaatatcaatgttactgtcagcaatagcagtataatagaggaaatgaaaaattgctctttcaatataaccacagaattaagagataagagagagaaaaagtatgcacttttttataaacttgatataatacaactagatggcagctctagtcagtatagattaataaattgtaatacctcagccataacacaagcctgtccaaaggtctcttttgacccaattcctatacattattgtgctccagctggttatgcgattctaaagtgtaataataagacattcaatggaacaggaccgtgtaataatgtcagcacagtacaatgtacacatggaattaagccagtggtttcaactcaactattgttaaatggtagcctagcagaaggagagataataattagatctgaaaatataacaaacagtgccaaaacaataatagtacatctcaatgaatctgtaaagattgagtgtacgagacccagtaataacacaagaacaagtataggaataggaccaggacaagcattttatgcaacaggacaagtaataggagacataagaaaagcacattgtaacattagtgaaagtaaatggaatgaaactttacaaagggtaagtaaaaaattaaaagaatacttccctgataagaatataacatttcaaccatcctcaggaggggacccagaagttacaacacatagctttaattgtggaggagaatttttctattgcaatacatcaagcctgtttaataggacatatatgactaatagtacagatatggctaatagtacagaaactaacagaaccatcacaatccactgcagaataaaacagattataaacatgtggcaggaggtgggacgagcaatgtatgcccctcccattgcaggaaacataacatgtatatcaaatatcacaggactactattgacaagggatggaggaaacagcagtacggggacagagacattcagacctggaggaggaaatatgaaggacaattggagaagtgaattatataaatataaagtggtagaagttaagccattaggagtagcacccactaatgcaagaaggagagtggtggagagagaaaaaagagcagtgggaatgggagctgtgttccttgggttcttgggagcggcaggaagcactatgggcgcagcatcaataacgctgacggtacaggccagacaattattgtctggtatagtgcaacagcaaagcaatttgctgaaggctatagaggctcaacagcatatgttgaaactcacggtctggggcattaaacagctccaggcaagagtcctggccttggaaagatacctaaaggatcaacagctcctagggatgtggggctgctctggaaaactcatctgcaccactaatgtatattggaactctagttggagtaataaaacttatgttgatatttgggataacatgacctggatgcagtgggagagagaaattagcaattatacagacataatatatgacttgcttgaagaatcacaaaaccagcaggaaaagaatgaacaagatttactagcattggacagatggaacagtctgtggaattggtttaacataacaaaatggctgtggtatataaaaatattcataatgatagtaggaggcttgataggtttaagaataatttttgctgtgctttctttagtaaatagagttaggcagggatactcacctctgtcgttgcagacccttatcccaagcccgaggggaccagacaggcccggaggaatcgaagaagaaggtggagagcaagacagaaacagatcaacgcgattagtgagcggattcttagcgcttgcctgggacgacctgcggagcctgtgccttttcctctaccaccgattgagagacttcatattaattgcagcgagagcgggggaacttctgggacgcagcagtctcaagggactacggagagggtgggaagcccttaagtatctgggaggtcttgtgcagtattggggcctggaactaaaaaggagtgctattagtctattagataccctagcaatagcagtaggtgaaggaacagataggattctagaatttgtattaggaatttgtagagctatccgcaacatacctacaagaataagacagggctttgaaacagctttgctataa

SEQ ID NO: 26 - DNA, 2547 bp, Artificial Sequence
  Description of Artificial Sequence: Synthetic polynucleotide
atgagagtgagggggatacagaggagttatccacaatggtggatatggagcatgttaggcttttggatgctaatgatttgtaatgggatgtgggtcacagtctactatggggtacctgtgtggaaagaagcaaaaactactctattttgtgcatcagatgctaaagcatatgagaaagaagtgcataatgtctgggctacacatgcctgtgtacccacagaccccaatccacaagaaatggttttaaaaaatgtaacagaaaatttcaacatgtgggaaaatgacatggtggatcagatgcatgaagatgtaattagtttatgggatcaaagcctcaagccatgtgtaaagttgactccactctgtgtcactctaaactgtatcaatgctactaatgctactgccagcgatagcagtatattagatggaatgaaaaattgctctttcaatataaccacagaattaagagataagagagagaaaaagaatgcacttttttataaacttgatatagtacaactaggtggcaactctagtcagtatagattaataaattgtaatacctcagtcataacacaagcctgtccaaaggtctcttttgacccaattcctatacattattgtgctccagctggttatgcgattctaaagtgtaataataagacattcaatggaacaggaccgtgtaataatgtcagcacagtacaatgtacacatggaattaagccagtggtttcaactcaactattgttaaatggtagcctagcagaaggagagataataattagatctaaaaatataacagacaatagcaaaacaataatagtacatctcaatgaatctgtaaagattgagtgtacgagacccagtaataacacaagaacaagtataagaataggaccaggacaagcattttatgcaacaggacaagtaataggaaatataagagaagcacattgtaacattagtgaaagtaaatggaatgagactttacaaagggtaagtgaaaaattaaaaaaatacttccctgataagaatataacatttcgaccatcctcaggaggggacctagaaattacaacacatagctttaattgtggaggagaatttttctattgcaatacatcaagcctgtttaataggacatatatggctactagtacagatatggctaatagtacagaaactaacatcatcacaatccactgcagaataaaacaaattataaacatgtggcaggaggtgggacgagcaatgtatgcccctcccattgcaggaaacataacatgtatatcaaatatcacaggactactattgacaagggatggaggaaacaatacagaggatacggagacattcagacctgtaggaggaaatatgaaggacaattggagcagtgaattatataaatataaagtggtagaagttaagccattaggagtagcacccactaatgcaagaaggagagtggtggagagagaaaaaagagcagtgggaatgggagctgtgttccttgggttcttgggagcggcaggaagcactatgggcgcagcatcaataacgctgacggtacaggccagacaattattgtctggtatagtgcaacagcaaagcaatttgctgaaggctatagaggctcaacagcatatgttgaaactcacggtctggggcattaaacagctccaggcaagagtcctggccttggaaagatacctaaaggatcaacagctcctagggatgtggggctgctctggaaaactcatctgcaccactaatgtatattggaactctagttggagtaataaaacttatgatgatatttgggataacatgacctggatgcagtgggagagagaaattagcaattatacagaactaatatatgaattgcttgaagaatcacaaaaccagcaggaaaagaatgaacaagatttactagcattggacagatggaacagtctgtggaattggtttaacataacaaattggctgtggtatataaaaatattcataatgatagtaggaggcttgataggtttaagaataatttttgctgtgctttctttagtaaatagagttaggcagggatactcacctctgtcattgcagacccttatcccaagcccgaggggaccagacaggcccggaggaatcgaagaagaaggtggagagcaagacagaaacagatcaacgcgattagtgagcggattcttagcgcttgcctgggacgacctgcggagcctgtgccttttcatctaccaccgattgagagacttcatattaattgcagcgagagcgggggaacttctgggacgcagcagtctcaagggactacggagagggtgggaagcccttaagtatctgggaagtcttgtgcagtattggggcctggaactaaaaaggagtgctattagtctattggataccctagcaatagcagtaggtgagggaacagataggattctagaatttgtattaggaatttgtagagctatccgcaacatacctacaagaataagacagggctttgaaacagctttgctataa

SEQ ID NO: 27 - DNA, 2541 bp, Artificial Sequence
  Description of Artificial Sequence: Synthetic polynucleotide
atgagagtgatggggatacagaggaattatccacaatggtggatatggagcatgttaggcttttggatgctaatgatttgtaatgggatgtgggtcacagtctactatggggtacctgtgtggaaagaagcaaaaactactctattttgtgcatcagatgctaaagcatatgagaaagaagtgcataatgtctgggctacacatgcctgtgtacccacagaccccaatccacaagaaatggttttaaaaaatgtaacagaaaatttcaacatgtggaaaaatgacatggtggatcagatgcatgaagatgtaattagtttatgggatcaaagcctcaagccatgtgtaaagttgaccccactctgtgtcactctaaactgtaccaatgctactgccagcaatagcagtataatagagggaatgaaaaattgctctttcaatataaccacagaattaagagataagagagagaaaaagaatgcacttttttataaacttgatatagtacaactagatggcaactctagtcagtatagattaataaattgtaatacctcagtcataacacaagcctgtccaaaggtctcttttgacccaattcctatacattattgtgctccagctggttatgcgattctaaagtgtaataataagacattcactggaacaggaccgtgtaataatgtcagcacagtacaatgtacacatggaattaagccagtggtttcaactcaactattgttaaatggtagcctagcagaaggagagataataattagatctgaaaatataacaaacaatgtcaaaacaataatagtacatctcaatgaatctgtaaagattgagtgtacgagacccaataataaaacaagaacaagtataagaataggaccaggacaagcattttatgcaacaggacaagtaataggagacataagagaagcatattgtaacattaatgaaagtaaatggaatgaaactttacaaagggtaagtaaaaaattaaaagaatacttccctcataagaatataacatttcaaccatcctcaggaggggacctagaaattacaacacatagctttaattgtggaggagaatttttctattgcaatacatcaagcctgtttaataggacatatatggctaatagtacagatatggctaatagtacagaaactaacagtacacgaaccatcacaatccactgcagaataaaacaaattataaacatgtggcaggaggtgggacgagcaatgtatgcccctcccattgcaggaaacataacatgtatatcaaatatcacaggactactattgacaagggatggaggaaaaaacaatacggagacattcagacctggaggaggaaatatgaaggacaattggagaagtgaattatataaatataaagtggtagaagttaagccattaggagtagcacccactaatgcaagaaggagagtggtggagagagaaaaaagagcagtgggaatgggagctgtgttccttgggttcttgggagcggcaggaagcactatgggcgcagcatcaataacgctgacggtacaggccagacaattattgtctggtatagtgcaacagcaaagcaatttgctgaaggctatagaggctcaacagcatatgttgaaactcacggtctggggcattaaacagctccaggcaagagtcctggccttggaaagatacctaaaggatcaacagctcctagggatgtggggctgctctggaaaactcatctgcaccactaatgtatattggaactctagttggagtaataaaacttatggtgatatttgggataacatgacctggatgcagtgggagagagaaattagcaattatacagaaataatatatgaattgcttgaagaatcacaaaaccagcaggaaaagaatgaacaagatttactagcattggacagatggaacagtctgtggaattggtttaacataacaaattggctgtggtatataaaaatattcataatgatagtaggaggcttgataggtttaagaataatttttgctgtgctttctttagtaaatagagttaggcagggatactcacctctgtcgttgcagacccttatcccaagcccgaggggaccagacaggcccggaggaatcgaagaagaaggtggagagcaagacagaaacagatcaacgcgattagtgagcggattcttagcgcttgtctgggacgacctgcggagcctgtgccttttcatctaccaccgattgagagacttcatattaattgcagcgagagcgggggaacttctgggacgcagcagtctcaagggactacggagaggatgggaagcccttaagtatctgggaagtcttgtgcagtattggggcctggaactaaaaaggagtgctattagtctattggataccctagcaatagcagtaggtgaaggaacagataggattctagaatttgtattaggaatttgtagagctatccgcaacatacctacaagaataagacagggctttgaaacagctttgctataa

SEQ ID NO: 28 - DNA, 2541 bp, Artificial Sequence
  Description of Artificial Sequence: Synthetic polynucleotide
atgagagtgatggggatacagaggaattatccacaatggtggatatggagcatgttaggcttttggatgctaatgatttgtaatgggatgtgggtcacagtctactatggggtacctgtgtggaaagaagcaaaaactactctattttgtgcatcagatgctaaagcatatgagaaagaagtgcataatgtctgggctacacatgcctgtgtacccacagaccccaatccacaagaaatggttttaaaaaatgtaacagaaaatttcaacatgtggaaaaatgacatggtggatcagatgcatgaagatgtaattagtttatgggatcaaagcctcaagccatgtgtaaagttgaccccactctgtgtcactctaaactgtaccaatgctactgccagcaatagcagtataatagagggaatgaaaaattgctctttcaatataaccacagaattaagagataagagagagaaaaagaatgcacttttttataaacttgatatagtacaactagatggcaactctagtcagtatagattaataaattgtaatacctcagtcataacacaagcctgtccaaaggtctcttttgacccaattcctatacattattgtgctccagctggttatgcgattctaaagtgtaataataagacattcactggaacaggaccgtgtaataatgtcagcacagtacaatgtacacatggaattaagccagtggtttcaactcaactattgttaaatggtagcctagcagaaggagagataataattagatctgaaaatataacaaaaaatgtcaaaacaataatagtacatctcaatgaatctgtaaagattgagtgtacgagacccaataataaaacaagaacaagtataagaataggaccaggacaagcattttatgcaacaggacaagtaataggagacataagagaagcatattgtaacattaatgaaagtaaatggaatgaaactttacaaagggtaagtaaaaaattaaaagaatacttccctcataagaatataacatttcaaccatcctcaggaggggacctagaaattacaacacatagctttaattgtggaggagaatttttctattgcaatacatcaagcctgtttaataggacatatatggctaatagtacagatatggctaatagtacagaaactaacagtacacgaaccatcacaatccactgcagaataaaacaaattataaacatgtggcaggaggtgggacgagcaatgtatgcccctcccattgcaggaaacataacatgtatatcaaatatcacaggactactattgacaagggatggaggaaaaaacaatacggagacattcagacctggaggaggaaatatgaaggacaattggagaagtgaattatataaatataaagtggtagaagttaagccattaggagtagcacccactaatgcaagaaggagagtggtggagagagaaaaaagagcagtgggaatgggagctgtgttccttgggttcttgggagcggcaggaagcactatgggcgcagcatcaataacgctgacggtacaggccagacaattattgtctggtatagtgcaacagcaaagcaatttgctgaaggctatagaggctcaacagcatatgttgaaactcacggtctggggcattaaacagctccaggcaagagtcctggccttggaaagatacctaaaggatcaacagctcctagggatgtggggctgctctggaaaactcatctgcaccactaatgtatattggaactctagttggagtaataaaacttatggtgatatttgggataacatgacctggatgcagtgggagagagaaattagcaattatacagaaataatatatgaattgcttgaagaatcacaaaaccagcaggaaaagaatgaacaagatttactagcattggacagatggaacagtctgtggaattggtttaacataacaaattggctgtggtatataaaaatattcataatgatagtaggaggcttgataggtttaagaataatttttgctgtgctttctttagtaaatagagttaggcagggatactcacctctgtcgttgcagacccttatcccaagcccgaggggaccagacaggcccggaggaatcgaagaagaaggtggagagcaagacagaaacagatcaacgcgattagtgagcggattcttagcgcttgtctgggacgacctgcggagcctgtgccttttcatctaccaccgattgagagacttcatattaattgcagcgagagcgggggaacttctgggacgcagcagtctcaagggactacggagaggatgggaagcccttaagtatctgggaagtcttgtgcagtattggggcctggaactaaaaaggagtgctattagtctattggataccctagcaatagcagtaggtgaaggaacagataggattctagaatttgtattaggaatttgtagagctatccgcaacatacctacaagaataagacagggctttgaaacagctttgctataa

SEQ ID NO: 29 - DNA, 2541 bp, Artificial Sequence
  Description of Artificial Sequence: Synthetic polynucleotide
atgagagtgatggggatacagaggaattatccacaatggtggatatggagcatgttaggcttttggatgctaatgatttgtaatgggatgtgggtcacagtctactatggggtacctgtgtggaaagaagcaaaaactactctattttgtgcatcagatgctaaagcatatgagaaagaagtgcataatgtctgggctacacatgcctgtgtacccacagaccccaatccacaagaaatggttttaaaaaatgtaacagaaaatttcaacatgtggaaaaatgacatggtggatcagatgcatgaagatgtaattagtttatgggatcaaagcctcaagccatgtgtaaagttgaccccactctgtgtcactctaaactgtaccaatgctactaccagcaatagcagtataatagagggaatgaaaaattgctctttcaatataaccacagaattaagagataagagagagaaaaagaatgcacttttttataaacttgatatagtacaactagatggcaactctagtcagtatagattaataaattgtaatacctcagtcataacacaagcctgtccaaaggtctcttttgacccaattcctatacattattgtgctccagctggttatgcgattctaaagtgtaataataagacattcactggaacaggaccgtgtaataatgtcagcacagtacaatgtacacatggaattaagccagtggtttcaactcaactattgttaaatggtagcctagcagaaggagagataataattagatctgaaaatataacaaacaatgtcaaaacaataatagtacatctcaatgaatctgtaaagattgagtgtacgagacccaataataaaacaagaacaagtataagaataggaccaggacaagcattttatgcaacaggacaagtaataggagacataagagaagcatattgtaacattagtgaaagtaaatggaatgaaactttacaaagggtaagtaaaaaattaaaagaatacttccctcataagaatataacatttcaaccatcctcaggaggggacctagaaattacaacacatagctttaattgtggaggagaatttttctattgcaatacatcaagcctgtttaataggacatatatggctaatagtacagatatggctaatagtacagaaactaacaatacacgaaccatcacaatccactgcagaataaaacaaattataaacatgtggcaggaggtgggacgagcaatgtatgcccctcccattgcaggaaacataacatgtatatcaaatatcacaggactactattgacaagggatggaggaaaaaacaatacggagacattcagacctggaggaggaaatatgaaggacaattggagaagtgaattatataaatataaagtggtagaagttaagccattaggagtagcacccactaatgcaagaaggagagtggtggagagagaaaaaagagcagtgggaatgggagctgtgttccttgggttcttgggagcggcaggaagcactatgggcgcagcatcaataacgctgacggtacaggccagacaattattgtctggtatagtgcaacagcaaagcaatttgctgaaggctatagaggctcaacagcatatgttgaaactcacggtctggggcattaaacagctccaggcaagagtcctggccttggaaagatacctaaaggatcaacagctcctagggatgtggggctgctctggaaaactcatctgcaccactaatgtatattggaactctagttggagtaataaaacttatggtgatatttgggataacatgacctggatgcagtgggagagagaaattagcaattatacagaaataatatatgaattgcttgaagaatcacaaaaccagcaggaaaagaatgaacaagatttactagcattggacagatggaacagtctgtggaattggtttaacataacaaattggctgtggtatataaaaatattcataatgatagtaggaggcttgataggtttaagaataatttttgctgtgctttctttagtaaatagagttaggcagggatactcacctctgtcgttgcagacccttatcccaagcccgaggggaccagacaggcccggaggaatcgaagaagaaggtggagagcaagacagaaacagatcaacgcgattagtgagcggattcttagcgcttgtctgggacgacctgcggagcctgtgccttttcatctaccaccgattgagagacttcatattaattgcagcgagagcgggggaacttctgggacgcagcagtctcaagggactacggagaggatgggaagcccttaagtatctgggaagtcttgtgcagtattggggcctggaactaaaaaggagtgctattagtctattggataccctagcaatagcagtaggtgaaggaacagataggattctagaatttgtattaggaatttgtagagctatccgcaacatacctacaagaataagacagggctttgaaacagctttgctataa

SEQ ID NO: 30 - DNA, 2541 bp, Artificial Sequence
  Description of Artificial Sequence: Synthetic polynucleotide
atgagagtgatggggatacaaaggaattatccacaatggtggatatggagcatgttaggcttttggatgctaatgatttgtaatgggatgtgggtcacagtctactatggggtacctgtgtggaaagaagcaaaaactactctattttgtgcatcagatgctaaagcatatgagaaagaagtgcataatgtctgggctacacatgcctgtgtacccacagaccccaatccacaagaaatggttttaaaaaatgtaacagaaaatttcaacatgtggaaaaatgacatggtggatcagatgcatgaagatgtaattagtttatgggatcaaagcctcaagccatgtgtaaagttgaccccactctgtgtcactctaaactgtaccaatgctactaccagcaatagcagtataatagagggaatgaaaaattgctctttcaatataaccacagaattaagagataagagagagaaaaagaatgcacttttttataaacttgatatagtacaactagatggcaactctagtcagtatagattaataaattgtaatacctcagtcataacacaagcctgtccaaaggtctcttttgacccaattcctatacattattgtgctccagctggttatgcgattctaaagtgtaataataagacattcactggaacaggaccgtgtaataatgttagcacagtacaatgtacacatggaattaagccagtggtttcaactcaactattgttaaatggtagcctagcagaaggagagataataattagatctgaaaatataacaaacaatgtcaaaacaataatagtacatctcaatgaatctgtaaagattgagtgtacgagacccaataataaaacaagaacaagtataagaataggaccaggacaagcattttatgcaacaggacaagtaataagaaacataagagaagcatattgtaacattaatgaaagtaaatggaatgaaactttacaaagggtaagtaaaaaattaaaagaatacttccctcataagaatataacatttcaaccatcctcaggaggggacctagaaattacaacacatagctttaattgtggaggagaatttttctattgcaatacatcaagcctgtttaataggacatatatggctaatagtacagatatggctaatagtacagaaactaacagtacacgaaccatcaaaatccactgcagaataaaacaaattataaacatgtggcaggaggtgggacgagcaatgtatgcccctcccattgcaggaaacataacatgtatatcaaatatcacaggactactattgacaagggatggaggaaaaaacaatacggagacattcagacctggaggaggaaatatgaaggacaattggagaagtgaattatataaatataaagtggtagaagttaagccattaggagtagcacccactaatgcaagaaggagagtggtggagagagaaaaaagagcagtgggaatgggagctgtgttccttgggttcttgggagcggcaggaagcactatgggcgcagcatcaataacgctgacggtacaggccagacaattattgtctggtatagtgcaacagcaaagcaatttgctgaaggctatagaggctcaacagcatatgttgaaactcacggtctggggcattaaacagctccaggcaagagtcctagccttggaaagatacctaaaggatcaacagctcctagggatgtggggctgctctggaaaactcatctgcaccactaatgtatattggaactctagttggagtaataaaacttatggtgatatttgggataacatgacctggatgcagtgggagagagaaattagcaattatacagaaataatatatgaattgcttgaagaatcacaaaaccagcaggaaaagaatgaacaagatttactagcattggacagatggaacagtctgtggaattggtttaacataacaaattggctgtggtatataaaaatattcataatgatagtaggaggcttgataggtttaagaataatttttgctgtgctttctttagtaaatagagttaggcagggatactcacctctgtcgttgcagacccttatcccaagcccgaggggaccagacaggcccggaggaatcgaagaagaaggtggagagcaagacagaaacagatcaacgcgattagtgagcggattcttagcgcttgtctgggacgacctgcggagcctgtgccttttcatctaccaccgattgagagacttcatattaattgcagcgagagcgggggaacttctgggacgcagcagtctcaagggactacggagaggatgggaagcccttaagtatctgggaagtcttgtgcagtattggggcctggaactaaaaaggagtgctattagtctattggataccctagcaatagcagtaggtgaaggaacagataggattctagaatttgtattaggaatttgtagagctatccgcaacatacctacaagaataagacagggctttgaaacagctttgctataa

SEQ ID NO: 31 - DNA, 2541 bp, Artificial Sequence
  Description of Artificial Sequence: Synthetic polynucleotide
atgagagtgatggggatacagaggaattatccacaatggtggatatggagcatgttaggcttttggatgctaatgatttgtaatgggatgtgggtcacagtctactatggggtacctgtgtggaaagaagcaaaaactactctattttgtgcatcagatgctaaagcatatgagaaagaagtgcataatgtctgggctacacatgcctgtgtacccacagaccccaatccacaagaaatggttttaaaaaatgtaacagaaaatttcaacatgtggaaaaatgacatggtggatcagatgcatgaagatgtaattagtttatgggatcaaagcctcaagccatgtgtaaagttgaccccactctgtgtcactctaaactgtaccaatgctactaccagcaatagcagtataatagagggaatgaaaaattgctctttcaatataaccacagaattaagagataagagagagaaaaagaatgcacttttttataaacttgatatagtacaactagatggcaactctagtcagtatagattaataaattgtaatacctcagtcataacacaagcctgtccaaaggtctcttttgacccaattcctatacattattgtgctccagctggttatgcgattctaaagtgtaataataagacattcactggaacaggaccgtgtaataatgtcagcacagtacaatgtacacatggaattaagccagtggtttcaactcaactattgttaaatggtagcctagcagaaggagagataataattagatctgaaaatataacaaacaatgccaaaacaataatagtacatctcaatgaatctgtaaagattgagtgtacgagacccaataataaaacaagaacaagtataagaataggaccaggacaagcattttatgcaacaggacaagtaataggagacataagaaaagcatattgtaacattaatgaaagtaaatggaatgaaactttacaaagggtaagtaaaaaattaaaagaatacttccctcataagaatataacatttcaaccatcctcaggaggggacctagaaattacaacacatagctttaattgtggaggagaatttttctattgcaatacatcaagcctgtttaataggacatatatggctaatagtacagatatggctaatagtacagaaactaacagtacacgaaccatcacaatccgctgcagaataaaacaaattataaacatgtggcaggaggtgggacgagcaatgtatgcccctcccattgcaggaaacataacatgtatatcaaatatcacaggactactattgacaagggatggaggaaaaaacaatacggagacattcagacctggaggaggaaatatgaaggacaattggagaagtgaattatataaatataaagtggtagaagttaagccattaggagtagcacccactaatgcaagaaggagagtggtggagagagaaaaaagagcagtgggaatgggagctgtgttccttggattcttgggagcggcaggaagcactatgggcgcagcatcaataacgctgacggtacaggccagacaattattgtctggtatagtgcaacagcaaagcaatttgctgaaggctatagaggctcaacagcatatgttgaaactcacggtctggggcattaaacagctccaggcaagagtcctggccttggaaagatacctaaaggatcaacagctcctagggatgtggggctgctctggaaaactcatctgcaccactaatgtatattggaactctagttggagtaataaaacttatggtgatatttgggataacatgacctggatgcagtgggagagagaaattagcaattatacagaaataatatatgaattgcttgaagaatcacaaaaccagcaggaaaagaatgaacaagatttactagcattggacagatggaacagtctgtggaattggtttaacataacaaattggctgtggtatataaaaatattcataatgatagtaggaggcttgataggtttaagaataatttttgctgtgctttctttagtaaatagagttaggcagggatactcacctctgtcgttgcagacccttatcccaagcccgaggggaccagacaggcccggaggaatcgaagaagaaggtggagagcaagacagaaacagatcaacgcgattagtgagcggattcttagcgcttgcctgggacgacctgcggagcctgtgccttttcatctaccaccgattgagagacttcatattaattgcagcgagagcgggggaacttctgggacgcagcagtctcaagggactacggagaggatgggaagcccttaagtatctgggaagtcttgtgcagtattggggcctggaactaaaaaggagtgctattagtctattggataccctagcaatagcagtaggtgaaggaacagataggattctagaatttgtattaggaatttgtagagctatccgcaacatacctacaagaataagacagggctttgaaacagctttgctataa

SEQ ID NO: 32 - DNA, 2556 bp, Artificial Sequence
  Description of Artificial Sequence: Synthetic polynucleotide
atgagagtgatggggatacagaggaattatccacaatggtggatatggagcatgttaggcttttggatgctaatgatttgtaatgggatgtgggtcacagtctactatggggtacctgtgtggaaagaagcaaaaactactctattttgtgcatcagatgctaaagcatatgagaaagaagtgcataatgtctgggctacacatgcctgtgtacccacagaccccaatccacaagaaatggttttaaaaaatgtaacagaaaatttcaacatgtggaaaaatgacatggtggatcagatgcatgaagatgtaattagtttatgggatcaaagcctcaagccatgtgtaaagttgaccccactctgtgtcactctaaactgtaccaatgctactgccagcaatgctactgccagcaatagcagtataatagagggaatgaaaaattgctctttcaatataaccacagaattaagagataagagagagaaaaagaatgcacttttttataaacttgatatagtacaactagatggcaactctagtcagtatagattaataaattgtaatacctcagtcataacacaagcctgtccaaaggtctcttttgacccaattcctatacattattgtgctccagctggttatgcgattctaaagtgtaataataagacattcactggaacaggaccgtgtaataatgtcagcacagtacaatgtacacatggaattaagccagtggtttctactcaactattgttaaatggtagcctagcagaaggagagataataattagatctgaaaatataacaaacaatgtcaaaacaataatagtacatctcaatgaatctgtaaagattgagtgtacgagacccaataataaaacaagaaaaagtataagaataggaccaggacaagcattttatgcaacaggacaagtaataggagacataagagaagcatattgtaacattaatgaaagtaaatggaatgaaactttacaaagggtaagtaaaaaattaaaagaatatttccctcataagaatataacatttcaaccatcctcaggaggggacctagaaattacaacacatagctttaattgtggaggagaatttttctattgcaatacatcaagcctgtttaataggacatatatggctaatagtacagatatggctaatagtacagaaactaacagtacacgaaccatcacaatccgctgcagaataaaacaaattataaacatgtggcaggaggtgggacgagcaatgtatgcccctcccattgcaggaaacataacatgtatatcaaatatcacaggactactattgacaagggatggaggaaaaaacaatacggagacattcagacctggaggaggaaatatgaaggacaattggagaagtgaattatataaatataaagtggtagaagttaagccattaggagtagcacccactaatgcaagaaggagagtggtggagagagaaaaaagagcagtgggaatgggagctgtgttccttgggttcttgggagcggcaggaagcactatgggcgcagcatcaataacgctgacggtacaggccagacaattattgtctggtatagtgcaacagcaaagcaatttgctgaaggctatagaggctcaacagcatatgttgaaactcacggtctggggcattaaacagctccaggcaagagtcctggccttggaaagatacctaaaggatcaacagctcctagggatgtggggctgctctggaaaactcatctgcaccactaatgtatattggaactctagttggagtaataaaacttatggtgatatttgggataacatgacctggatgcagtgggagagagaaattagcaattatacagaaataatatatgaattgcttgaagaatcacaaaaccagcaggaaaagaatgaacaagatttactagcattggacagatggaacagtctgtggaattggtttaacataacaaattggctgtggtatataaaaatattcataatgatagtaggaggcttgataggtttaagaataatttttgctgtgctttctttagtaaatagagttaggcagggatactcacctctgtcgttacagacccttatcccaagcccgaggggaccagacaggcccggaggaatcgaagaagaaggtggagagcaagacagaaacagatcaacgcgattagtgagcggattcttagcgcttgtctgggacgacctgcggagcctgtgccttttcatctaccaccgattgagagacttcatattaattgcagcgagagcgggggaacttctgggacgcagcagtctcaagggactacggagaggatgggaagcccttaagtatctgggaagtcttgtgcagtattggggcctggaactaaaaaggagtgctattagtctattggataccctagcaatagcagtaggtgaaggaacagataggattctagaatttgtattaggaatttgtagagctatccgcaacatacctacaagaataagacagggctttgaaacagctttgctataa

SEQ ID NO: 33 - DNA, 2574 bp, Artificial Sequence
  Description of Artificial Sequence: Synthetic polynucleotide
atgagagtgatggggatacagaggaattatccacaatggtggatatggagcatgttaggcttttggatgctaatgatttgtaatgggatgtgggtcacagtctactatggggtacctgtgtggaaagaagcaaaaactactctattttgtgcatcagatgctaaagcatatgagaaagaagtgcataatgtctgggctacacatgcctgtgtacccacagaccccaatccacaagaaatggttttaaaaaatgtaacagaaaatttcaacatgtggaaaaatgacatggtggatcagatgcatgaagatgtaattagtttatgggatcaaagcctcaagccatgtgtaaagttgaccccactctgtgtcactctaaactgtaccaatgctactaccaatgctactgccagcaatagcagtataatagagggaatgaaaaattgctctttcaatataaccacagaattaagagataagagagagaaaaagaatgcacttttttataaacttgatatagtacaactagatggcaactctagtcagtatagattaataaattgtaatacctcagtcataacacaagcctgtccaaaggtctcttttgacccaattcctatacattattgtgctccagctggttatgcgattctaaagtgtaataataagacattcactggaacaggaccgtgtaataatgtcagcacagtacaatgtacacatggaattaagccagtggtttcaactcaactattgttaaatggtagcctagcagaaggagagataataattagatctgaaaatataacaaacaatgccaaaacaataatagtacatctcaatgaatctgtaaagattgagtgtacgagacccaataataaaacaagaacaagtataagaataggaccaggacaagcattttatgcaacaggacaagtaataggagacataagagaagcatattgtaacattagtgaaagtaaatggaatgaaactttacaaagggtaagtaaaaaattaaaagaatacttccctcataagaatataacatttcaaccatcctcaggaggggacctagaaattacaacacatagctttaattgtggaggagaatttttctattgcaatacatcaagcctgtttaataggacatatatggctaatagtacagatatggctaatagtacagaaactaacagtacacgaatcatcacaatccactgcagaataaaacaaattataaacatgtggcaggaggtgggacgagcaatgtatgcccctcccattgcaggaaacataacatgtatatcaaatatcacaggactactattgacaagggatggaggaaaaaacacaagggatggaggaaaaaacaatacggagacattcagacctggaggaggaaatatgaaggacaattggagaagtgaattatataaatataaagtggtagaagttaagccattaggagtagcacccactaatgcaagaaggagagtggtggagagagaaaaaagagcagtgggaatgggagctgtgttccttgggttcttgggagcggcaggaagcactatgggcgcagcatcaataacgctgacggtacaggccagacaattattgtctggtatagtgcaacagcaaagcaatttgctgaaggctatagaggctcaacagcatatgttgaaactcacggtctggggcattaaacagctccaggcaagagtcctggccttggaaagatacctaaaggatcaacagctcctagggatgtggggctgctctggaaaactcatctgcaccactaatgtatattggaactctagttggagtaataaaacttatggtgatatttgggataacatgacctggatgcagtgggagagagaaattagcaattatacagaaataatatatgaattgcttgaagaatcacaaaaccagcaggaaaagaatgaacaagatttactagcattggacagatggaacagtctgtggaattggtttaacataacaaattggctgtggtatataaaaatattcataatgatagtaggaggcttgataggtttaagaataatttttgctgtgctttctttagtaaatagagttaggcagggatactcacctctgtcgttgcagacccttatcccaagcccgaggggaccagacaggcccggaggaatcgaagaagaaggtggagagcaagacagaaacagatcaacgcgattagtgagcggattcttagcgcttgcctgggacgacctgcggagcctgtgccttttcatctaccaccgattgagagacttcatattaattgcagcgagagcgggggaacttctgggacgcagcagtctcaagggactacggagaggatgggaagcccttaagtatctgggaagtcttgtgcagtattggggcctggaactaaaaaggagtgctattagtctattggataccctagcaatagcagtaggtgaaggaacagataggattctagaatttgtattaggaatttgtagagctatccgcaacatacctacaagaataagacagggctttgaaacagctttgctataa

SEQ ID NO: 34 - DNA, 2556 bp, Artificial Sequence
  Description of Artificial Sequence: Synthetic polynucleotide
atgagagtgatggggatacagaggaattatccacaatggtggatatggagcatgttaggcttttggatgctaatgatttgtaatgggatgtgggtcacagtctactatggggtacctgtgtggaaagaagcaaaaactactctattttgtgcatcagatgctaaagcatatgagaaagaagtgcataatgtctgggctacacatgcctgtgtacccacagaccccaatccacaagaaatggttttaaaaaatgtaacagaaaatttcaacatgtggaaaaatgacatggtggatcagatgcatgaagacgtaattagtttatgggatcaaagcctcaagccatgtgtaaagttgaccccactctgtgttactctaaactgtaccaatgctactaatgctactgccagcaatagcagtataatagagggaatgaaaaattgctctttcaatataaccacagaattaagagataagagagagaaaaagaatgcacttttttataaacttgatatagtacaactagatggcaactccagtcagtatagattaataaattgtaatacctcagtcataacacaagcctgtccaaaggtctcttttgacccaattcctatacattattgtgctccagctggttatgcgattctaaagtgtaataataagacattcactggaacaggatcgtgtaataatgtcagcacagtacaatgtacacatggaattaagccagtggtttcaactcaactattgttaaatggtagcctagcagaaggagagataataattagatctgaaaatataacagacaatggcaaaacaataatagtacatctcaatgaatctgtaaagattgagtgtacgagacccaataataaaacaagaacaagtataagaataggaccaggacaagcattttatgcaacaggacaagtaataggagacataaaagaagcatattgtaacattagtgaaagtaaatggaatgaaactttacaaagggtaagtaaaaaattaaaagaatacttccctcataagaatataacatttcaaccatcctcaggaggggacctagaaattacaacacatagctttaattgtggaggagaatttttctattgcaatacatcaagcctgtttaataggacatatatggctaatagtacagatatggctaatagtacagaaactaacagtacacgaaacatcacaatccactgcagaataaaacaaattataaacatgtggcaggaggtgggacgagcaatgtatgcccctcccattgcaggaaacataacatgtatatcaaatatcacaggactactattgacaagggatggaggaaaaaacaatacggatacggagacattcagacctggaggaggaaatatgaaggacaattggagaagtgaattatataaatataaagtggtagaagttaagccattaggagtagcacccactaatgcaagaaggagagtggtggagagagaaaaaagagcagtgggaatgggagctgtgttccttgggttcttgggagcggcaggaagcactatgggcgcagcatcaataacgctgacggtacaggccagacaattattgtctggtatagtgcaacagcaaagcaatttgctgaaggctatagaggctcaacagcatatgttgaaactcacggtctggggcattaaacagctccaggcaagagtcctggccttggaaagatacctaaaggatcaacagctcctagggatgtggggctgctctggaaaactcatctgcaccactaatgtatattggaactctagttggagtaataaaacttatggtgatatttgggataacatgacctggatgcagtgggagagagaaattagcaattatacagaaataatatatgaattgcttgaagaatcacaaaaccagcaggaaaagaatgaacaagatttactagcattggacagatggaacagtctgtggaattggtttaacataacaaattggctgtggtatataaaaatattcataatgatagtaggaggcttgataggtttaagaataatttttgctgtgctttctttagtaaatagagttaggcagggatactcacctctgtcgttacagacccttatcccaagcccgaggggaccagacaggcccggaggaatcgaagaagaaggtggagagcaagacagaaacagatcaacgcgattagtgagcggattcttagcgcttgtctgggacgacctgcggagcctgtgccttttcatctaccaccgattgagagacttcatattaattgcagcgagagcgggggaacttctgggacgcagcagtctcaagggactacggagaggatgggaagcccttaagtatctgggaagtcttgtgcagtattggggcctggaactaaaaaggagtgctattagtctattggataccctagcaatagcaataggtgaaggaacagataggattctagaatttgtattaggaatttgtagagctatccgcaacatacctacaagaataagacagggctttgaaacagctttgctataa

SEQ ID NO: 35 - DNA, 2553 bp, Artificial Sequence
  Description of Artificial Sequence: Synthetic polynucleotide
atgagagtgatggggatacagaggaattatccacaatggtggatatggagcatgttaggcttttggatgctaatgatttgtaatgggatgtgggtcacagtctactatggggtacctgtgtggaaagaagcaaaaactactctattttgtgcatcagatgctaaagcatatgagaaagaagtgcataatgtctgggctacacatgcctgtgtacccacagaccccaatccacaagaaatggttttaaaaaatgtaacagaaaatttcaacatgtggaaaaatgacatggtggatcagatgcatgaagatgtaattagtttatgggatcaaagcctcaagccatgtgtaaagttgaccccactctgtgtcactctaaactgtaccaatgctactaccaatgctactgccagcaatagcagtataatagaggaaatgaaaaattgctctttcaatataaccacagaattaagagataagagagagaaaaagaatgcacttttttataaacttgatatagtacaactagatggcaactctagtcagtatagattaataaattgtaatacctcagtcataacacaagcctgtccaaaggtctcttttgacccaattcctatacattattgtgctccagctggttatgcgattctaaagtgtaataataagacattcactggaacaggaccgtgtaataatgtcagcacagtacaatgtacacatggaattaagccagtggtttcaactcaattattgttaaatggtagcctagcagaaggagagataataattagatctgaaaatataacaaacactgccaaaacaataatagtacatctcaatgaatctgtaaagattgagtgtacgagacccaataataaaacaagaacaagtataagaataggaccaggacaagcattttatgcaacaggacaagtaataggagacataagagaagcatattgtaacattagtgaaagtaaatggaatgaaactttacaaagggtaagtaaaaaattaaaagaatacttccctcataagaatataacatttcaaccatcctcaggaggggacctagaaattacaacacatagctttaattgtggaggagaatttttctattgcaatacatcaagcctgtttaataggacatatatggctaatagtacagatatggctaatagtacagaaactaacagtacacgaaccatcacaatccgctgcagaataaaacaaattataaacatgtggcaggaggtgggacgagcaatgtatgcccctcccattgcaggaaacataacatgtatatcaaatatcacaggactactattgacaagggatggaggagaaaacaatacggagacattcagacctggaggaggaaatatgaaggacaattggagaagtgaattatataaatataaagtggtagaagttaagccattaggagtagcacccactaatgcaagaaggagagtggtggagagagaaaaaagagcagtgggaatgggagctgtgttccttgggttcttgggagcggcaggaagcactatgggcgcagcatcaataacgctgacggtacaggccagacaattattgtctggtatagtgcaacagcaaagcaatttgctgaaggctatagaggctcaacagcatatgttgaaactcacggtctggggcattaaacagctccaggcaagagtcctggccttggaaagatacctaaaggatcaacagctcctagggatgtggggctgctctggaaaactcatctgcaccactaatgtatattggaactctagttggagtaataaaacttatggtgatatttgggataacatgacctggatgcagtgggagagagaaattagcaattatacagaaataatatatgaattgcttgaagaatcacaaaaccagcaggaaaagaatgaacaagatttactagcattggacagatggaacagtctgtggaattggtttaacataacaaattggctgtggtatataaaaatattcataatgatagtaggaggcttgataggtttaagaataatttttgctgtgctttctttagtaaatagagttaggcagggatactcacctctgtcgttgcagacccttatcccaagcccgaggggaccagacaggcccggaggaatcgaagaagaaggtggagagcaagacagaaacagatcaacgcgattagtgagcggattcttagcgcttgtctgggacgacctgcggagcctgtgccttttcatctaccaccgattgagagacttcatattaattgcagcgagagcgggggaacttctgggacgcagcagtctcaagggactacggagaggatgggaagcccttaagtatctgggaagtcttgtgcagtattggggcctggaactaaaaaggagtgctattagtctattggataccctagcaatagcagtaggtgaaggaacagataggattctagaatttgtattaggaatttgtagagctatccgcaacatacctacaagaataagacagggctttgaaacagctttgctataa

SEQ ID NO: 36 - DNA, 2559 bp, Artificial Sequence
  Description of Artificial Sequence: Synthetic polynucleotide
atgagagtgatggggatacagaggaattatccacaatggtggatatggagcatgttaggcttttggatgctaatgatttgtaatgggatgtgggtcacagtctactatggggtacctgtgtggaaagaagcaaaaactactctattttgtgcatcagatgctaaagcatatgagaaagaagtgcataatgtctgggctacacatgcctgtgtacccacagaccccaatccacaagaaatggttttaaaaaatgtaacagaaaatttcaacatgtggaaaaatgacatggtggatcagatgcatgaagatgtaattagtttatgggatcaaagcctcaagccatgtgtaaagttgacccccctctgtgtcactctaaactgtaccaatgctactgccaatgctactgccagcaatagcagtataatagagggaatgaaaaattgctctttcaatataaccacagaattaagagataagagagagaaaaagaatgcacttttttataaacttgatatagtacaactagatggcaactctagtcagtatagattaataaattgtaatacctcagtcataacacaagcctgtccaaaggtctcttttgacccaattcctatacattattgtgctccagctggttatgcgattctaaagtgtaataataagacattcaatggaacaggaccgtgtaataatgtcagcacagtacaatgtacacatggaattaagccagtggtttcaactcaactattgttaaatggtagcctagcagaaggagagataataattagatctgaaaatataacaaacaatgtcaaaacaataatagtacatctcaatgaatctgtaaagattgagtgtacgagacccaataataaaacaagaacaagtataagaataggaccaggacaagcattttatgcaacaggacaagtaataggagacataagagaagcatattgtaacattagtgaaagtaaatggaatgaaactttacaaagggtaagtaaaaaattaaaagaatacttccctcataagaatataacatttcaaccatcctcaggaggggacctagaaattacaacacatagctttaattgtggaggagaatttttctattgcaatacatcaagcctgtttaataggacatatatggctaatagtacagatatggctaatagtacagaaactaacagtacacgaaccatcaaaatccactgcagaataaaacaaattataaacatgtggcaggaggtgggacgagcaatgtatgcccctcccattgcaggaaacataacatgtatatcaaatatcacaggactactattgacaagggatggaggaaaaaacaatacggatacggagacattcagacctggaggaggaaatatgaaggacaattggagaagtgaattatataaatataaagtggtagaagttaagccattaggagtagcacccactaatgcaagaaggagagtggtggagagagaaaaaagagcagtgggaatgggagctgtgttccttgggttcttgggagcggcaggaagcactatgggcgcagcatcaataacgctgacggtacaggccagacaattattgtctggtatagtgcaacagcaaagcaatttgctgaaggctatagaggctcaacagcatatgttgaaactcacggtctggggcattaaacagctccaggcaagagtcctggccttggaaagatacctaaaggatcaacagctcctagggatgtggggctgctctggaaaactcatctgcaccactaatgtatattggaactctagttggagtaataaaacttatggtgatatttgggataacatgacctggatgcagtgggagagagaaattagcaattatacagaaataatatatgaattgcttgaagaatcacaaaaccagcaggaaaagaatgaacaagatttactagcattggacagatggaacagtctgtggaattggcttaacataacaaattggctgtggtatataaaaatattcataatgatagtaggaggcttgataggtttaagaataatttttgctgtgctttctttagtaaatagagttaggcagggatactcacctctgtcgttacagacccttatcccaagcccgaggggaccagacaggcccggaggaatcgaagaagaaggtggagagcaagacagaaacagatcaacgcgattagtgagcggattcttagcgcttgtctgggacgacctgcggagcctgtgccttttcatctaccaccgattgagagacttcatattaattgcagcgagagcgggggaacttctgggacgcagcagtctcaagggactacggagaggatgggaagcccttaagtatctgggaagtcttgtgcagtattggggcctggaactaaaaaggagtgctattagtctattggataccctagcaatagcagtaggtgaaggaacagataggattctagaatttgtattaggaatttgtagagctatccgcaacatacctacaagaataagacagggctttgaaacagctttgctataa

SEQ ID NO: 37 - DNA, 2541 bp, Artificial Sequence
  Description of Artificial Sequence: Synthetic polynucleotide
atgagagtgatggggatacagaggaattatccacaatggtggatatggagcatgttaggcttttggatgctaatgatttgtaatgggatgtgggtcacagtctactatggggtacctgtgtggaaagaagcaaaaactactctattttgtgcatcagatgctaaagcatatgagaaagaagtgcataatgtctgggctacacatgcctgtgtacccacagaccccaatccacaagaaatggttttaaaaaatgtaacagaaaatttcaacatgtggaaaaatgacatggtggatcagatgcatgaagatgtaattagtttatgggatcaaagcctcaagccatgtgtaaagatgaccccactctgtgtcactctaaactgtaccaatgctactgccatcaatagcagtataatagagggaatgaaaaattgctctttcaatataaccacagaattaagagataagagagagaaaaagaatgcacttttttataaacttgatatagtacaactagatggcaactctagtcagtatagattaataaattgtaatacctcagtcataacacaagcctgtccaaaggtctcttttgacccaattcctatacattattgtgctccagctggttatgcgattctaaagtgtaataataagacattcactggaacaggaccgtgtaataatgtcagcacagtacaatgtacacatggaattaagccagtggtttcaactcaactattgttaaatggtagcctagcagaaggagagataataattagatctgaaaatataacaaacaatgacaaaacaataatagtacatctcaatgaatctgtaaagattgagtgtacgagacccaataataaaacaagaacaagtataagaataggaccaggacaagcattttatgcaacaggacaagtaataggagacataagagaagcatattgtaacattagtgaaagtaaatggaatgaaactttacaaagggtaagtaaaaaattaaaagaatacttccctcataagaatataacatttcaaccatcctcaggaggggacctagaaattacaacacatagctttaattgtggaggagaatttttctattgcaatacatcaagcctgtttaataggacatatatggctaatagtacagatatggctaatagtacggaaactaacaatacacgacccatcacaatccactgcagaataaaacaaattataaacatgtggcaggaggtgggacgagcaatgtatgcccctcccattgcaggaaacataacatgtatatcaaatatcacaggactactattgacaagggatggaggaaaaaacaatacggagacattcagacctggaggaggaaatatgaaggacaattggagaagtgaattatataaatataaagtggtagaagttaagccattaggaatagcacccactaatgcaagaaggagagtggtggagagagaaaaaagagcagtgggaatgggagctgtgttccttgggttcttgggagcggcaggaagcactatgggcgcagcatcaataacgctgacggtacaggccagacaattattgtctggtatagtgcaacagcaaagcaatttgctgaaggctatagaggctcaacagcatatgttgaaactcacggtctggggcattaaacagctccaggcaagagtcctggccttagaaagatacctaaaggatcaacagctcctagggatgtggggctgctctggaaaactcatctgcaccactaatgtatattggaactctagttggagtaataaaacttatggtgatatttgggataacatgacctggatgcagtgggagagagaaattagcaattatacagaaataatatatgaattgcttgaagaatcacaaaaccagcaggaaaagaatgaacaagatttactagcattggacagatggaacagtctgtggaattggtttaacataacaaattggctgtggtatataaaaatattcataatgatagtaggaggcttgataggtttaagaataatttttgctgtgctttctttagtaaatagagttaggcagggatactcacctctgtcgttgcagacccttatcccaagcccgaggggaccagacaggcccggaggaatcgaagaagaaggtggagagcaagacagaaacagatcaacgcgattagtgagcggattcttagcgcttgtctgggacgacctgcggagcctgtgccttttcatctaccaccgattgagagacttcatattaattgcagcgagagcgggggaacttctgggacgcagcagtctcaagggactacggagaggatgggaagcccttaagtatctgggaagtcttgtgcagtattggggcctggaactaaaaaggagtgctattagtctattggataccctagcaatagcagtaggtgaaggaacagataggattctagaatttgtattaggaatttgtagagctatccgcaacatacctacaagaataagacagggctttgaaacagctttgctataa

SEQ ID NO: 38 - DNA, 2541 bp, Artificial Sequence
  Description of Artificial Sequence: Synthetic polynucleotide
atgagagtgatggggatacagaggaattatccacaatggtggatatggagcatgttaggcttttggatgctaatgatttgtaatgggatgtgggtcacagtctactatggggtacctgtgtggaaagaagcaaaaactactctattttgtgcatcagatgctaaagcatatgagaaagaagtgcataatgtctgggctacacatgcctgtgtacccacagaccccaatccacaagaaatggttttaaaaaatgtaacagaaaatttcaacatgtggaaaaatgacatggtggatcagatgcatgaagatgtaattagtttatgggatcaaagcctcaagccatgtgtaaagttgaccccactctgtgtcactctaaactgtaccaatgctactaatgctactgccagcaatagcagtatattagagggaatgaaaaattgctctttcaatataaccacagaattaagagataagagagagaaaaagaatgcacttttttataaacttgatatagtacaactagatggcaactctagtcagtatagattaataaattgtaatacctcagtcataacacaagcctgtccaaaggtctcttttgacccaattcctatacattattgtgctccagctggttatgcgattctaaagtgtaataataagacattcaatggaacaggaccgtgtaataatgtcagcacagtacaatgtacacatggaattaagccagtggtttcaactcaactattgttaaatggtagcctagcagaaggagagataataattagatctgaaaatataacagacaatggcaaaacaataatagtacatctcaatgaatctgtaaagattgagtgtacgagacccagtaataacacaagaacaagtataagaataggaccaggacaagcattttatgcaacaggacaagtaataggagacataagagaagcacattgtaacattagtgaaagtaaatggaatgaaactttacaaagggtaagtaaaaaattaaaagaatacttccctcataagaatataacatttcaaccatcctcaggaggggacctagaaattacaacacatagctttaattgtggaggagaatttttctattgcaatacatcaagcctgtttaataggacatatatggctaatagtacagaaactaacagtacacgaaccatcacactccactgcagaataaaacaaattataaacatgtggcaggaggtgggacgagcaatgtatgcccctcccattgcaggaaacataacatgtatatcaaatatcacaggactactattgacaagggatggaggaaaaaacaatacggagacattcgagacattcagacctggaggaggaaatatgaaggacaattggagaagtgaattatataaatataaagtggtagaagttaagccattaggagtagcacctactaatgcaagaaggagagtggtggagagagaaaaaagagcagtgggaatgggagctgtgttccttgggttcttgggagcggcaggaagcactatgggcgcagcatcaataacgctgacggtacaggccagacaattattgtctggtatagtgcaacagcaaagcaatttgctgaaggctatagaggctcaacagcatatgttgaaactcacggtctggggcattaaacagctccaggcaagagtcctggccttggaaagatacctaaaggatcaacagctcctagggatgtggggttgctctggaaaactcatctgcaccactaatgtatattggaactctagttggagtaataaaacttatggtgatatttgggataacatgacctggatgcagtgggagagagaaattagcaattatacagaaataatatatgaattgcttgaagaatcacaaaaccagcaggaaaagaatgaacaagatttactagcattggacagatggaacagtctgtggaattggtttaacataacaaattggctgtggtatataaaaatattcataatgatagtaggaggcttgataggtttaagaataatttttgctgtgctttctttagtaaatagagttaggcagggatactcacctctgtcgttgcagacccttatcccaagcccgaggggaccagacaggcccggaggaatcgaagaagaaggtggagagcaagacagaaacagatcaacgcgattagtgagcggattcttagcgcttgcctgggacgacctgcggagcctgtgccttttcatctaccaccgattgagagacttcatattaattgcagcgagagcgggggaacttctgggacgcagcagtctcaagggactacggagagggtgggaagcccttaagtatctgggaagtcttgtgcagtattggggcctggaactaaaaaggagtgctattagtctattggataccctagcaatagcagtaggtgaaggaacagataggattctagaatttgtattaggaatttgtagagctatccgcaacatacctacaagaataagacagggctttgaaacagctttgctataa

SEQ ID NO: 39 - DNA, 2547 bp, Artificial Sequence
  Description of Artificial Sequence: Synthetic polynucleotide
atgagagtgatggggatacagaggaattatccacaatggtggatatggagcatgttaggcttttggatgctaatgatttgtaatgggatgtgggtcacagtctactatggggtacctgtgtggaaagaagcaaaaactactctattttgtgcatcagatgctaaagcatatgagaaagaagtgcataatgtctgggctacacatgcctgtgtacccacagaccccaatccacaagaaatggttttaaaaaatgtaacagaaaatttcaacatgtggaaaaatgacatggtggatcagatgcatgaagatgtaattagtttatgggatcaaagcctcaagccatgtgtaaagttgaccccactctgtgtcactctaaactgtaccgatgctactgccagcaatgctactgccatcaatagcagtataatagagggaatgaaaaattgctctttcaatataaccacagaattaagagataagagagagaaaaagaatgcacttttttataaacttgatatagtacaactagatggcaactctagtcagtatagattaataaattgtaatacctcagtcataacacaagcctgtccaaaggtctcttttgacccaattcctatacattattgtgctccagctggttatgcgattctaaagtgtaataataagacattcaatggaacaggaccgtgtaataatgtcagcacagtacaatgtacacatggaattaagccagtggtttcaactcaactattgttaaatggtagcctagcagaaggagagataataattagatctgaaaatataacaaacaatgccaaaacaataatagtacatctcaatgaatctgtaaagattgagtgtacgagacccagtaataacacaagaacaagtataagaataggaccaggacaagcattttatgcaacaggacaagtaataggagacataagagaagcacattgtaacattagtgaaagtaaatggaatgaaactttacaaagggtaagtaaaaaattaaaagaatacttccctcataagaatataacatttcaaccatcctcaggaggggacctagaaattacaacacatagctttaattgtggaggagaatttttctattgcaatacatcaagcctgtttaataggacatatatggctaatagtacagaaactaacagtacacgaatcatcacaatccgctgcagaataaaacaaattataaacatgtggcaggaggtgggacgagcaatgtatgcccctcccattgcaggaaacataacatgtatatcaaatatcacaggactactattgacaagggatggaggaaaaaacaatacggagacattcgagacattcagacctgaaggaggaaatatgaaggacaattggagaagtgaattatataaatataaagtggtagaagttaagccattaggagtagcacccactaatgcaagaaggagagtggtggagagagaaaaaagagcagtgggaatgggagctgtgttccttgggttcttgggagcggcaggaagcactatgggcgcagcatcaataacgctgacggtacaggccagacaattattgtctggtatagtgcaacagcaaagcaatttgctgaaggctatagaggctcaacagcatatgttgaaactcacggtctggggcattaaacagctccaggcaagagtcctggccttggaaagatacctaaaggatcaacagctcctagggatgtggggctgctctggaaaactcatctgcaccactaatgtatattggaactctagttggagtaataaaacttatggtgatatttgggataacatgacctggatgcagtgggagagagaaattagcaattatacagaaataatatatgaattgcttgaagaatcacaaaaccagcaggaaaagaatgaacaagatttactagcattggacagatggaacagtctgtggaattggtttaacataacaaattggctgtggtatataaaaatattcataatgatagtaggaggcttgataggtttaagaataatttttgctgtgctttctttagtaaatagagttaggcagggatactcacctctgtcattgcagacccttatcccaagcccgaggggaccagacagacccggaggaatcgaagaagaaggtggagagcaagacagaaacagatcaacgcgattagtgagcggattcttagcgcttgcctgggacgacctgcggagcctgtgccttttcatctaccaccgattgagagacttcatattaattgcagcgagagcgggggaacttctgggacgcagcagtctcaagggactacggagaggatgggaagcccttaagtatctgggaagtcttgtgcagtattggggcctggaactaaaaagaagtgctattagtctattggataccctagcaatagcagtaggtgaaggaacagataggattctagaatttgtattaggaatttgtagagctatccgcaacatacctacaagaataagacagggctttgaaacagctttgctataa

SEQ ID NO: 40 - DNA, 2553 bp, Artificial Sequence
  Description of Artificial Sequence: Synthetic polynucleotide
atgagagtgatggggatacagaggaattatccacaatggtggatatggagcatgttaggcttttggatgctaatgatttgtaatgggatgtgggtcacagtctactatggggtacctgtgtggaaagaagcaaaaactactctattttgtgcatcagatgctaaagcatatgagaaagaagtgcataatgtctgggctacacatgcctgtgtacccacagaccccaatccacaagaaatggttttaaaaaatgtaacagaaaatttcaacatgtggaaaaatgacatggtagatcagatgcatgaagatgtaattagtttatgggatcaaagcctcaagccatgtgtaaagttgaccccactctgtgtcactctaaactgtaccgatgctactgccagcaatgctactgccagcaatgctactgccagcaatagcagtataatagagggaatgaaaaattgctctttcaatataaccacagaattaagagataagagagagaaaaagaatgcacttttttataaacttgatatagtacaactagatggcaactctagtcagtatagattaataaattgtaatacctcagtcataacacaagcctgtccaaaggtctcttttgacccaattcctatacattattgtgctccagctggttatgcgattctaaagtgtaataataagacattcaatggaacaggaccgtgtaataatgtcagcacagtacaatgtacacatggaattaagccagtggtttcaactcaactattgttaaatggtagcctagcagaaggagagataataattagatctgaaaatataacagacaatggcaaaacaataatagtacatctcaatgaatctgtaaagattgagtgtacgagacccagtaataacacaagaacaagtataagaataggaccaggacaagcattttatgcaacaggacaagtaataggagacataagagaagcacattgtaacattagtgaaagtaaatggaatgaaactttacaaagggtaagtaaaaaattaaaagaatacttccctcataagaatataacatttcaaccatcctcaggaggggacctagaaattacaacacatagttttaattgtggaggagaatttttctattgcaatacatcaagcctgtttaataggacatatatggctaatagtacagaaactaacagtacacgaatcatcacaatccgctgcagaataaaacaaattataaacatgtggcaggaggtgggaagagcaatgtatgcccctcccattgcaggaaacataacatgtatatcaaatatcacaggactactattgacaagggatggaggaaataacaatacggagacattcagacctggaggaggaaatatgaaggacaattggagaagtgaattatataaatataaagtggtagaagttaagccattaggagtagcacccactaatgcaagaaggagagtggtggagagagaaaaaagagcagtgggaatgggagctgtgttccttgggttcttgggagcggcaggaagcactatgggcgcagcatcaataacgctgacggtacaggccagacaattattgtctggtatagtgcaacagcaaagcaatttgctgaaggctataggggctcaacagcatatgttgaaactcacggtctggggcattaaacagctccaggcaagagtcctggccttggaaagatacctaaaggatcaacagctcctagggatgtggggctgctctggaaaactcatctgcaccactaatgtatattggaactctagttggagtaataaaacttatggtgatatttgggataacatgacctggatgcagtgggagagagaaattagcaattatacagaaatgatatatgaattgcttgaagaatcacaaaaccagcaggaaaagaatgaacaagatttactagcattggacagatggaacagtctgtggaattggtttaacataacaaattggctgtggtatataaaaatattcataatgatagtaggaggcttgataggtttaagaataatttttgctgtgctctctttagtaaatagagttaggcagggatactcacctctgtcattgcagacccttatcccaagcccgaggggaccagacaggcccggaggaatcgaagaagaaggtggagagcaagacagaaagagatcaacgcgattagtgagcggattcttagcgcttgtctgggacgacctgcggagcctgtgccttttcatctaccaccgattgagagacttcatattaattgcagcgagagcgggggaacttctgggacgcagcagtctcaagggactacggagaggatgggaagcccttaagtatctgggaagtcttgtgcagtattggggcctggaactaaaaaggagtgctattagtctattggataccctagcaatagcagtaggtgaaggaacagataggattctagaatttgcattaggaatttgtagagctatccgcaacatacctacaagaataagacagggctttgaaacagctttgctataa

SEQ ID NO: 41 - DNA, 2580 bp, Artificial Sequence
  Description of Artificial Sequence: Synthetic polynucleotide
atgagagtgatggggatacagaggaattatccacaatggtggatatggagcatgttaggcttttggatgctaatgatttgtaatgggatgtgggtcacagtctactatggggtacctgtgtggaaagaagcaaaaactactctattttgtgcatcagatgctaaagcatatgagaaagaagtgcataatgtctgggctacacatgcctgtgtacccacagaccccaatccacaagaaatggttttaaaaaatgtaacagaaaatttcaacatgtggaaaaatgacatggtggatcagatgcatgaagatgtaattagtttatgggatcaaagcctcaagccatgtgtaaagttgaccccactctgtgtcactctaaactgtaccaatgctaatgctactgccagcaatagcagtataatagagggaatgaatagcagtataatagagggaatgaaaaattgctctttcaatataaccacagaattaagagataagagagagaaaaagaatgcacttttttataaacttgatatagtacaactagatggcaactctagtcagtatagattaataaattgtaatacctcagtcataacacaagcctgtccaaaggtctcttttgacccaattcctatacattattgtgctccagctggttatgcgattctaaagtgtaataataagacattcaatggaacaggaccgtgtaataatgtcagcacagtacaatgtacacatggaattaagccagtggtttcaactcaactattgttaaatggtagcctagcagaaggagagataataattagatctgaaaacataacagacaatggcaaaacaataatagtacatctcaatgaatctgtaaagattgagtgtacgagacccagtaataacacaagaacaagtataagaataggaccaggacaagcattttatgcaacaggacaagtaataggagacataagagaagcacattgtaacattagtgaaagtaaatggaatgaaactttacaaagggtaagtgaaaaattaaaagaatacttccctcataagaatataacatttcaaccatcctcaggaggggacctagaaattacaacacatagctttaattgtggaggagaatttttctattgcaatacatcaagcctgtttaataggacatatatggctactagtacagatatggctaatagtacagaaactaacagtacacgaatcatcacaatccgctgcagaataaaacaaattataaacatgtggcaggaggtgggacgagcaatgtatgcccctcccattgcaggaaacataacatgtatatcaaatatcacaggactactattgacaagggatggaggaaaaaacaatacggagacattcgagacattcagacctggaggaggaaatatgaaggacaattggagaagtgaattatataaatataaagtggtagaagttaagccattaggagtagcacccactaatgcaaggaggagagtggtggagagagaaaaaagagcagtgggaatgggagctgtgttccttgggttcttgggagcggcaggaagcactatgggcgcagcatcaataacgctgacggtacaggccagacaattattgtctggtatagtgcaacagcaaagcaatttgctgaaggctatagaggctcaacagcatatgttgaaactcacggtctggggcattaaacagctccaggcaagagtcctggccttggaaagatacctaaaggatcaacagctcctagggatgtggggctgctctggaaaactcatctgcaccactaatgtatattggaactctagttggagtaataaaacttatggtgatatttgggataacatgacctggatgcagtgggagagagaaattagcaattatacagaaataatatatgaactgcttgaagaatcacaaaaccagcaggaaaagaatgaacaagatttactagcattggacagatggaacagtctgtggaattggtttaacataacaaattggctgtggtatataaaaatattcataatgatagtaggaggcttgataggtttaagaataatttttgctgtgctttctttagtaaatagagttaggcagggatactcacctctgtcgttacagacccttatcccaagcccgaggggaccagacaggcccggaggaatcgaagaagaaggtggagagcaagacagaaacagatcaacgcgattagtgagcggattcttagcgcttgcctgggacgacctgcggagcctgtgccttttcatctaccaccgattgagagacttcatattaattgcagcgagagcgggggaacttctgggacgcagcagtctcaagggactacggagagggtgggaagcccttaagtatctgggaagtcttgtgcagtattggggcctggaactaaaaaggagtgctattagtctattggataccctagcaatagcagtaggtgaaggaacagataggattctagaatttgtattaggaatttgtagagctatccgcaacatacctacaagaataagacagggctttgaaacagctttgctataa

SEQ ID NO: 42 - DNA, 2580 bp, Artificial Sequence
  Description of Artificial Sequence: Synthetic polynucleotide
atgagagtgatggggatacagaggaattatccacaatggtggatatggagcatgttaggcttgtggatgctaatgatttgtaatgggatgtgggtcacagtctactatggggtacctgtgtggaaagaagcaaaaactactctattttgtgcatcagatgctaaagcatatgagaaagaagtgcataatgtctgggctacacatgcctgtgtacccacagaccccaatccacaagaaatggttttaaaaaatgtaacagaaaatttcaacatgtggaaaaatgacatggcggatcagatgcatgaagatgtaattagtttatgggatcaaagcctcaagccatgtgtaaagttgaccccactctgtgtcactctaaactgtaccgatgctactgccagcaatgctactgccagcaatgctactgccagcaatagcagtatcaatagcagtataatagaggaaatgaaaaattgctctttcaatataaccacagaattaagagataagagagagaaaaagaatgcacttttttataaacttgatatagtacaactagatggcaactctagtcagtatagattaataaattgtaatacctcagccataacacaagcctgtccaaaggtatcttttgacccaattcctatacattattgtgctccagctggttatgcgattctaaagtgtaataataagacattcaatggaacaggaccgtgtaataatgtcagcacagtacaatgtacacatggaattaagccagtggtttcaactcaactattgttaaatggtagcctagcagaaggagagataataattagatctgaaaatataacagacaatggcaaaacaataatagtacatctcaatgaatctgtaaagattgagtgtacgagacccagtaataacacaagaacaagtataagaataggaccaggacaagcattttatgcaacaggacaagtaataggagacataagagaagcacattgtaacattagtgaaagtaaatggaatgaaactttacaaagggtaagtaaaaaattaaaagaatacttccctcataagaatataacatttcaaccatcctcaggaggggacctagaagttacaacacatagctttaattgtggaggagaatttttctattgcaatacatcaagcctgtttaataggacagatatggctaatagtacagaaactaacagtacacgaatcatcacaatccgctgcagaataaaacaaattgtaaacatgtggcaggaggtgggacgagcaatgtatgcccctcccattgcaggaaacataacatgtatatcaaatatcacaggactactattgacaagggatggaggagaaaacaatggaggaaaaaacaatacagagacattcagacctggaggaggaaatatgaaggacaattggagaagtgaattatataaatataaagtggtagaagttaagccattaggagtagcacccactaatgcaagaaggagagtggtggagagagaaaaaagagcagtgggaatgggagctgtgttccttgggttcttgggagcggcaggaagcactatgggcgcagcatcaataacgctgacggtacaggccagacaattattgtctggtatagtgcaacagcaaagcaatttgctgaaggctatagaggctcaacagcatatgttgaaactcacggtctggggcattaaacagctccaggcaagagtcctggccttggaaagatacctaaaggatcaacagctcctagggatgtggggctgctctggaaaactcatctgtaccactaatgtatattggaactctagttggagtaataaaacttatggtgatatttgggataacatgacctggatgcagtgggagagagaaattagcaattatacagaaataatatatgaattgcttgaagaatcacaaaaccagcaggaaaagaatgaacaagatttactagcattggacagatggaacagtctgtggaattggtttaacataacaaaatggctgtggtatataaaaatattcataatgatagtaggaggcttgataggtttaagaataatttttgctgtgctctctttagtaaatagagttaggcagggatactcacctctgtcattgcagacccttatcccaagcccgaggggaccagacaggcccggaggaatcgaagaagaaggtggagagcaagacagaaacagatcaacgcgattagtgagcggattcttagcgcttgcctgggacgacctgcggagcctgtgccttttcatctaccaccgattgagagacttcatattaattgcagcgagagcgggggaacttctgggacgcagcagtctcaagggactacggagaggatgggaagcccttaagtatctgggaggtcttgtgcagtattggggcctggaactaaaaaggagtgctattagtctattggataccctagcaatagcagtaggtgaaggaacagataggattctagaatttgtattaggaatttgtagagctatccgcaacatacctacaagaataagacagggctttgaaacagctttgctataa

SEQ ID NO: 43 - DNA, 2592 bp, Artificial Sequence
  Description of Artificial Sequence: Synthetic polynucleotide
atgagagtgatggggatacagaggaattatccacaatggtggatatggagcatgttaggcttgtggatgctaatgatttgtaatgggatgtgggtcacagtctactatggggtacctgtgtggaaagaagcaaaaactactctattttgtgcatcagatgctaaagcatatgagaaagaagtgcataatgtctgggctacacatgcctgtgtacccacagaccccaatccacaagaaatggttttaaaaaatgtaacagaaaatttcaacatgtggaaaaatgacatggtagatcagatgcatgaagatgtaattagtttatgggatcaaagcctcaagccatgtgtaaagttgaccccactctgtgtcactctaaactgtaccgatgctactgccagcaatgctactgccagcaatgctactgccagcaatgctactgccagcaatagcagtataataatagagggaatgaaaaattgctctttcaatataaccacagaattaagagataagagagagaaaaagaatgcacttttttataaacttgatatagtacaactagatggcaactctagtcagtatagattaataaattgtaatacctcagtcataacacaagcctgtccaaaggtctcttttgacccaattcctatacattattgtgctccagctggttatgcgattctaaagtgtaataataagacattcaatggaacaggaccgtgtaataatgtcagcacagtacaatgtacacatggaattaagccagtggtttcaactcaactattgttaaatggtagcctagcagaaggagagataataattagatctaaaaatataacagacaatggcaaaacaataatagtacatctcaatgaatctgtaaagattgagtgtacgagacccagtaataacacaagaacaagtataagaataggaccaggacaagcattttatgcaacaggacaagtaataggagacataagagaagcacattgtaacattagtgaaagtaaatggaatgaaactttacaaagggtaagtaaaaaattaaaagaatacttccctcagaagaatataacatttcaaccatcctcaggaggggacctagaaattacaacacatagctttaattgtggaggagaatttttctattgcaatacatcaagcctgtttaataggacatatatggctaatagtacagatatggctaatagtacagaaactaacagaaccatcacaatccgctgcagaataaaacaaattataaacatgtggcaggaggtgggacgagcaatgtatgcccctcccattgcaggaaacataacatgtatatcaaatatcacaggactactattgacaagggatggaggaaaaaacaatacggagacattcgagacattcagacctggaggaggaaatatgaaggacaattggagaagtgaattatataaatataaagtggtagaagttaagccattaggagtagcacccactaatgcaagaaggagagtggtggagagagaaaaaagagcagtgggaatgggagctgtgttccttgggttcttgggagcggcaggaagcactatgggcgcagcatcaataacgctgacggtacaggccagacaattattgtctggtatagtgcaacagcaaagcaatttgctgaaggctatagaggctcaacagcatatgttgaaactcacggtctggggcattaaacagctccaggcaagagtcctggccttggaaagatacctaaaggatcaacagctcctagggatgtggggctgctctggaaaactcatctgcaccactaatgtatattggaactctagttggagtaataaaacttatggtgatatttgggataacatgacctggatgcagtgggagagagaaattagcaattatacagaaatgatatatgaattgcttgaagaatcacaaaaccagcaggaaaagaatgaacaagatttactagcattggacagatggaacagtctgtggaattggtttaacataacaaagtggctgtggtatataaaaatattcataatgatagtaggaggcttgatatgtttaagaataatttttgctgtgctttctttagtaaatagagttaggcagggatactcacctctgtcgttgcagacccttatcccaagcccgaggggaccagacaggcccggaggaatcgaagaagaaggtggagagcaagacagaaagagatcaacgcgattagtgagcggattcttagcgcttgtctgggacgacctgcggagcctgtgccttttcatctaccaccgattgagagacttcatattaattgcagcgagagcgggggaacttctgggacgcagcagtctcaagggactacggagaggatgggaagcccttaagtatctgggaagtcttgtgcagtattggggcctggaactaaaaaggagtgctattagtctattggataccctagcaatagcagtaggtgaaggaacagataggattctagaatttgcattaggaatttgtagagctatccgcaacatacctacaagaataagacagggctttgaaacagctttgctataa

SEQ ID NO: 44 - DNA, 2547 bp, Artificial Sequence
  Description of Artificial Sequence: Synthetic polynucleotide
atgagagtgacggggatacagaggaattatccacaatggtggatatggagcatgttaggcttgtggatgctaatgatttgtaatgggatgtgggtcacagtctactatggggtacctgtgtggaaagaagcaaaaactactctattttgtgcatcagatgctaaagcatatgagaaagaagtgcataatgtctgggctacacatgcctgtgtacccacagaccccaatccacaagaaatggttttaaaaaatgtaacagaaaatttcaacatgtggaaaaatgacatggcagatcagatgcatgaagatgtaattagtttatgggatcaaagcctcaagccatgtgtaaagttgaccccactctgtgtcactctaaactgtatcgatgccaatgctactgccagcaatgctactgccagcaatagcagtataatagagggaatgaaaaattgctctttcaatataaccacagaattaagagataagatagagaaaaagaatgcacttttttataaacttgatatagtacaactagatggcaactctagtcagtatagattaataaattgtaatacctcagtcataacacaagcctgtccaaaggtctcttttgacccaattcctatacattattgtgctccagctggttatgcgattctaaagtgtaataataagacattcaatggaacaggaccgtgtaataatgtcagcacagtacaatgtacacatggaattaagccagtggtttcaactcaactattgttaaatggtagcctagcagaaggagagataataattagatctgaaaatataacaaacagtgccaaaacaataatagtacatctcaatgaatctgtaaagattgagtgtacgagacccagtaataacacaagaacaagtataagaataggaccaggacaagcattttatgcaacaggacaagtaataggagacataagaaaagcacattgtaacattagtgaaagtaaatggaatgaaactttacaaagggtaagtaaaaaattaaaagaatacttccctcataagaatataacatttcaaccatcctcaggaggggacctagaaattacaacacatagctttaattgtggaggagaatttttctattgcaatacatcaagcctgtttaataggacatacatggctaatagtacagaaactaacagtacacgaaccatcacactccactgcagaataaaacaaattataaacatgtggcaggaggtgggacgagcaatgtatgcccctcccattgcaggaaacataacatgtatatcaaatatcacaggactactattgacaagggatggaggaaataacaatactacggagacattcagacctggaggaggaaatatgaaggacaattggagaagtgaattatataaatataaagtggtagaaattaagccattaggagtagcacccactaatgcaagaaggagagtggtggagagagaaaaaagagcagtgggaatgggagctgtgttccttgggttcttgggagcggcaggaagcactatgggcgcagcatcaataacgctgacggtacaggccagacaattattgtctggtatagtgcaacagcaaagcaatttgctgaaggctatagaggctcaacagcatatgttgaaactcacggtctggggcattaaacagctccaggcaagagtcctggccttggaaagatacctaaaggatcaacagctcctagggatgtggggctgctctggaaaactcatctgcaccactaatgtatattggaactctagttggagtaataaaacttatggtgatatttgggataacatgacctggatgcagtgggagagagaaattagcgattatacagaaataatatatgaattgcttgaagaatcacaaaaccagcaggaaaagaatgaacaagatttactagcattggacagatggaacagtctgtggaattggtttaacataacaaactggctgtggtatataaaaatattcataatgatagtaggaggcttgataggtttaagaataatttttgctgtgctttctttagtaaatagagttaggcagggatactcacctctgtcgttgcagacccttaccccaagcccgaggggaccagacaggcccggaggaatcgaagaagaaggtggagagcaagacagaaacagatcaacgcgattagtgagcggattcttagcgcttgcctgggacgacctgcggagcctgtgccttttcatctaccaccgattgagagacttcatattaattgcagcgagagcgggggaacttctgggacgcagcagtctcaagggactacggagaggatgggaagcccttaagtatctgggaggtcttgtgcagtattggggcctggaactaaaaaggagtgctattagtctattggataccctagcaatagcagtaggtgaaggaacagataggattctagaatttgtattaggaatttgtagagctatccgcaacatacctacaagaataagacagggctttgaaacagctttgctataa

SEQ ID NO: 45 - DNA, 2559 bp, Artificial Sequence
  Description of Artificial Sequence: Synthetic polynucleotide
atgagagtgatggggatacagaggaattatccacaatggtggatatggagcatgttaggcttttggatgctaatgatttgtaatgggatgtgggtcacagtctactatggggtacctgtgtggaaagaagcaaaaactactctattttgtgcatcagatgctaaagcatatgagaaagaagtgcataatgtctgggctacacatgcctgtgtacccacagaccccaatccacaagaaatggttttaaaaaatgtaacagaaaattttaacatgtggaaaaatgacatggtggatcagatgcatgaagatgtaattagtttatgggatcaaagcctcaagccatgtgtaaagttaaccccactctgtgtcactctagactgtatcaatgctactaatgctactgccagcaatagcagtatattagagggaatgaaaaattgctctttcaatataaccacagaattaagagataagagagagaaaaagaatgcacttttttataaacttgatatagtacaactaggtggcaactctagtcagtatagattaataaattgtaatacctcagtcataacacaagcctgtccaaaggtctcttttgacccaattcctatacattattgtgctccagctggttatgcgattctaaagtgtaataataagacattcaatggaacaggaccgtgtaataatgtcagcacagtacaatgtactcatggaattaagccagtggtttcaactcaactattgttaaatggtagcctagcagaaggagagataataattagatctaaaaatataacagacaatggcaaaacaataatagtacatctcaatgaatctgtaaagattgagtgtacgagacccagtaataacacaagaacaagtataagaataggaccaggacaagcattttatgcaacaggacaagtaataggagacataagagaagcacattgtaacattagtgaaagtaaatggaatgaaactttacaaagggtaagtaaaaaattaaaagaatacttccctgataagaatataacatttcaaccatcctcaggaggggacctagaaattacaacacatagctttaattgtggaggagaatttttctattgcaatacatcaagcctgtttaataggacatatatggttaatagtacagatatggctaatagtacagaaactaacagtacacgaaccatcacaatccgctgcagaataaaacaaattataaacatgtggcaggaggtgggacgagcaatgtatgcccctcccattgcaggaaacataacatgtatatcaaatatcacaggactactattgacaagggatggaggagaaaacaatacggagacattcgagacattcagacctggaggaggaaatatgaaggacaattggagaagtgaattatataaatataaagtggtagaagttaagccattaggagtagcacccactaatgcaagaaggagagtggtggagagagaaaaaagagcagtgggaatgggagctgtgttccttgggttcttgggagcggcaggaagcactatgggcgcagcatcaataacgctgacggtacaggccagacaattattgtctggtatagtgcaacagcaaagcaatttgctgaaggctatagaggctcaacagcatatgttgaaactcacggtctggggcattaaacagctccaggcaagagtcctggccttggaaagatacctaaaggatcaacagctcctagggatgtggggctgctctggaaaactcatctgcaccactaatgtatattggaactctagttggagtaataaaacttatggtgatatttgggataacatgacctggatgcagtgggagagagaaattagcaattatacagaactaatatatgaattgcttgaagaatcacaaaaccagcaggaaaagaatgaacaagatttactagcattggacagatggaacagtctgtggaattggtttaacataacaaattggctgtggtatataaaaatattcataatgatagtaggaggcttgataggtttaagaataatttttgctgtgctttctttagtaaatagagttaggcagggatactcacctctgtcattgcagacccttatcccaagcccgaggggaccagacaggcccggaggaatcgaagaagaaggtggagagcaagacagaaacagatcaacgcgattagtgagcggattcttagcgcttgcctgggacgacctgcggagcctgtgccttttcatctaccaccgattgagagacttcatattaattgcagcgagagcgggggaacttctgggacgcagcagtctcaagggactacggagagggtgggaagcccttaagtatctgggaagtcttgtgcagtattggggcctggaactaaaaaggagtgctattagtctattggataccctagcaatagcagtaggtgaaggaacagataggattctagaatttgtattaggaatttgtagagctatccgcaacatacctacaagaataagacagggctttgaaacagctttgctataa

SEQ ID NO: 46 - DNA, 2550 bp, Artificial Sequence
  Description of Artificial Sequence: Synthetic polynucleotide
atgagagtgatggggatacagaggaattatccacaatggtggatatggagcatgttaggcttttggatgctaatgatttgtaatgggatgtgggtcacagtctactatggggtacctgtgtggaaagaagcaaaaactactctattttgtgcatcagatgctaaagcatatgagaaagaagtgcataatgtctgggctacacatgcctgtgtacccacagaccccaatccacaagaaatggttttaaaaaatgtaacagaaaatttcaacatgtggaaaaatgacatggtggatcagatgcatgaagatgtaattagtttatgggatcaaagcctcaagccatgtgtaaagttgaccccactctgtgtcactctaagctgtaccaatgctactaatgctactgccagcaatagcagtatattagagggaatgaaaaattgctctttcaatataaccacagaattaagagataagagagagaaaaagaatgcacttttttataaacttgatatagtacaactagatggcaactctagtcagtatagattaataaattgtaatacctcagtcataacacaagcctgtccaaaggtctcttttgacccaattcctatacattattgtgctccagctggttatgcgattctaaagtgtaataataagacattcaatggaacaggaccgtgtaataatgtcagcacagtacaatgtacacatggaattaagccagtggtttcaactcaactattgttaaatggtagcctagcagaaggagagataataattagatctaaaaatataacagacaatggcaaaacaataatagtacatctcaatgaatctgtaaagattgagtgtacgagacccagtaataacacaagaacaagtataagaataggaccaggacaagcattttatgcaacaggacaagtaataggagacataagagaagcacattgtaacattagtgaaagtaaatggaatgaaactttacaaagggtaagtgaaaaattaaaagaatacttccctcataagaatataacatttcaaccatcctcaggaggggacctagaaattacaacacatagctttaattgtggaggagaatttttctattgcaatacatcaagcctgtttaataggacatatatggctactagtacagatatggctaatagtacagaaactaacagtacacgaatcatcacaatccgctgcagaataaaacaaattataaacatgtggcaggaggtgggacgagcaatgtatgcccctcccattgcaggaaacataacatgtatatcaaatatcacaggactactattgacaagggatggaggaaaaaacgatacggatacattcagacctgaaggaggaaatatgaaggacaattggagaagtgaattatataaatataaagtggtagaagttaagccattaggagtagcacccactaatgcaagaaggagagtggtggagagagaaaaaagagcagtgggaatgggagctgtgttccttgggttcttgggagcggcaggaagcactatgggcgcagcatcaataacgctgacggtacaggccagacaattattgtctggtatagtgcaacagcaaagcaatttgctgaaggctatagaggctcaacagcatatgttgaaactcacggtctggggcattaaacagctccaggcaagagtcctggccttggaaagatacctaaaggatcaacagctcctagggatgtggggctgctctggaaaactcatctgcaccactaatgtatattggaactctagttggagtaataaaacttatggtgatatttgggataacatgacctggatgcagtgggagagagaaattagcaattatacagaactaatatatgaattgcttgaagaatcacaaaaccagcaggaaaagaatgaacaagatttactagcattggacagatggaacagtctgtggaattggtttaacataacaaattggctgtggtatataaaaatattcataatgatagtaggaggcttgataggtttaagaataatttttgctgtgctttctttagtaaatagagttaggcagggatactcacctctgtcattgcagacccttatcccaagcccgaggggaccagacaggcccggaggaatcgaagaagaaggtggagagcaagacagaaacagatcaacgcgattagtgagcggattcttagcgcttgcctgggacgacctgcggagcctgtgccttttcatctaccaccgattgagagacttcatattaattgcagcgagagcgggggaacttctgggacgcagcagtctcaagggactacggagagggtgggaagcccttaagtatctgggaaatcttgtgcagtattggggcctggaactaaaaaggagtgctattagtctattggataccctagcaatagcagtaggtgaaggaacagataggattctagaatttgtattaggaatttgtagagctatccgcaacatacctacaagaataagacagggctttgaaacagctttgctataa

SEQ ID NO: 47 - DNA, 2571 bp, Artificial Sequence
  Description of Artificial Sequence: Synthetic polynucleotide
atgagagtgatggggatacagaggaattatccacaatggtggatatggagcatgttaggcttgtggatgctaatgatttgtaatgggatgtgggtcacagtctactatggggtacctgtgtggaaaaaagcaaaaactactctattttgtgcatcagatgctaaagcatatgagaaagaagtgcatagtgtctgggctacacatgcctgtgtacccacagaccccaatccacaagaaatggttttaaaaaatgtaacagaaaatttcaacatgtggaaaaatgacatggtagatcagatgcatgaagatgtaattagtttatgggatcaaagcctcaagccatgtgtaaagttgaccccactctgtgtcactctaaactgtaccgatgctaatgctactgccagcaatagcagtataataaagggaatgaatagcagtatgatagaggaaatgaaaaattgctctttcaatataaccacagaattaagagataagagagagaaaaagaatgcacttttttataaacttgatatagtacaactagatggcaactctagtcagtatagattaataaattgtaatacctcagtcataacacaagcctgtccaaaggtctcttttgacccaattcctatacattattgtgctccagctggttatgcgattctaaagtgtaataataagacattcaatggaacaggaccgtgtaataatgtcagcacagtacaatgtacacatggaattaagccagtggtttcaactcaactattgttaaatggcagcctagcagaaggagagataataattagatctgaaaatataacaaacagtgccaaaacaataatagtacatctcaatgaatctgtaaagattgagtgtacgagacccagtaataacacaagaacaagtataagaataggaccaggacaagcattttatgcaacaggacaagtaataggagacataagaaaagcacattgtaacattagtgaaagtaaatggaatgaaactttacaaagggtaagtaaaaaattaaaagaatacttccctgataggaatataacatttcaaccatcctcaggaggggacccagaaattacaacacatagctttaattgtggaggaaaatttttctattgcaatacatcaagcctgtttaatagaacatatatggctaatagtacagatatggctaatagtacagaaactaacagtacacgaatcatcacaatccgctgcagaataaaacaaattataaacatgtggcaggaggtgggacgagcaatgtatgcccctcccattgcaggaaacataacatgtatatcaaatatcacaggactactattgacaagggatggaggaaataacaatacggagacattcagacctgtaggaggaaatatgaaggacaattggagaagtaaattatataaatataaagtggtagaagttaagccattaggagtagcacccactaaggcaagaaggagaatggtggagagagaaaaaagagcagtgggaatgggagctgtgttccttgggttcttgggagcggcaggaagcactatgggcgcagcatcaataacgctgacggtacaggccagacaattattgtctggtatagtgcaacagcaaagcaatttgctgaaggctatagaggctcaacagcatatgttgaaactcacggtctggggcattaaacagctccaggcaagagtcctggccttggaaagatacctaaaggatcaacagctcctagggatgtggggctgctctggaaaactcatctgcaccactaatgtatattggaactctagttggagtaataaaacttatggtgatatttgggataacatgacctggatgcagtgggagagagaaattagcaattatacagaaataatatatgacttgcttgaagaatcacaaaaccagcaggaaaagaatgaacaagatttactagcattggacagatggaacagtctgtggaattggtttaacataacaaaatggctgtggtatataaaaatattcataatgatagtaggaggcttgataggtttaaaaataatttttgctgtgctttctttagtaaatagagttaggcagggatactcacctctgtcgttgcagacccttatcccaagcccgaggggaccagacaggcccggaggaatcgaagaagaaggtggagagcaagacagaaacagatcaacgcgattagtgagcggattcttagcgcttgcctgggacgacctgcggagcctgtgccttttcatctaccaccgattgagagactttatattaattgcagcgagagcgggggaacttctgggacgcagcagtctcaagggactacggagaggatgggaagcccttaagtatctggaaggtcttgtgcagtattggggcctggaactaaaaaggagtgctattagtctattggataccctagcaatagcagtaggtgaaggaacagataggattctagaatttgtattaggaatttgtagagctatccgcaacatacctacaagaataagacagggctttgaaacagctttgctataa

SEQ ID NO: 48 - DNA, 2589 bp, Artificial Sequence
  Description of Artificial Sequence: Synthetic polynucleotide
atgagagtgatggggaggcagaggaattatccacaatggtggatatggagcatgttaggcttgtggatgctaatgatttgtaatgggatgtgggtcacagtctactatggggtacctgtgtggaaagaagcaaaaactactctattttgtgcatcagatgctaaagcatatgagaaagaagtgcataatgtctgggctacacatgcctgtgtacccacagaccccaatccacaagaaatggttttaaaaaatgtaacagaaaatttcaacatgtgggaaaatgacatggtagatcagatgcatgaagatgtaattagtttatgggatcaaagcctcaagccatgtgtaaagttgaccccactctgtgtcactctaaactgtaccgatgctaatgctactgccagcaataccaatgctactgccagcaatatcaatgctactgccagcaagaacagtataatagaggaaatgaaaaattgctctttcaatataaccacagaattaagagataagagagagaaaaagtatgcacttttttataaacttgatatagtacaactagatggcaactctagtcagtatagattaataaattgtaatacctcagtcataacacaagcctgtccaaaggtctcttttgacccaattcctatacattattgtgctccagctggttatgcgattctaaagtgtaataataagacattcaatggaacaggaccgtgtaataatgtcagcacagtacaatgtacacatggaattaagccagtggtttcaactcaactattgttaaatggtagcctagcagaaggagagataataattagatctaaaaatataacagacaatggcaaaacaataatagtacatctcaatgaatctgtaaagattgaatgtacgagacccagtaataacacaagaacaagtataagaataggaccaggacaagcattttatgcaacaggacaagtaataggagacataagagaagcacattgtaacattagtgaaagtaaatggaatgaaactttacaaagggtaagtaaaaaattaaaagaatacttccctgataagaatataacatttcaatcatcctcaggaggggacccagaaattacaacacatagctttaattgtggaggagaatttttctattgcaatacatcaagcctgtttaataggacatatatggctaatagtacagatatggctaatagtacagaaactaacagtacacgaatcatcacaatccgctgcagaataaaacaaattataaacatgtggcaggaggtgggacgagcaatgtatgcccctcccattgcaggaaacataacatgtatatcaaatatcacaggactactattgacaagggatggaggaaacagcagtacggagacattcagacctgaaggaggaaatatgaaggacaattggagaagtgaattatataaatataaagtggtagaagttaagccattaggagtagcacccactaatgcaagaaggagagtggtggagagagaaaaaagagcagtgggaatgggagctgtgttccttgggttcttgggagcggcaggaagcactatgggcgcagcatcaataacgctgacggtacaggccagacaattattgtctggtatagtgcaacagcaaagcaatttgctgaaggctatagaggctcaacagcatatgttgaaactcacggtctggggcattaaacagctccaggcaagagtcctggccttggaaagatacctaaaggatcaacagctcctagggatgtggggctgctctggaaaactcatctgcaccactaatgtatattggaactctagttggagtaataaaacttatgatgatatttgggataacatgacctggatgcagtgggagagagaaattagcaattatacagaaatgatatatgacttgcttgaagaatcacaaaaccagcaggaaaagaatgaacaagatttactagcattggacagatggaacagtctgtggaattggtttaacataacaaaatggctgtggtatataaaaatattcataatgatagtaggaggcttgataggtttaagaataatttttgctgtactttctttagtaaatagagttaggcagggatactcacctctgtcgttgcagacccttatcccaagcccgaggggaccagacaggcccggaggaatcgaagaagaaggtggagagcaagacagaaagagatcaacgcgattagtgagcggattcttagcgcttgtctgggacgacctgcggagcctgtgccttttcatctaccaccgattgagagacttcatattaattgcagcgagagcgggggaacttctgggacgcagcagtctcaagggactacggagagggtgggaagcccttaagtatctgggaagtcttgtgcagtattggggcctggaactaaaaaggagtgctattagtttattggataccctagcaatagcagtaggtgaaggaacagataggattctagaatttgtattaggaatttgtagagctatccgcaacatacctacaagaataagacagggctttgaaacagctttgctataa

SEQ ID NO: 49 - DNA, 2592 bp, Artificial Sequence
  Description of Artificial Sequence: Synthetic polynucleotide
atgagagtgatggggatacagaggaattatccacaatggtggatatggagcatgttaggcttgtggatgctaatgatttgtaatgggatgtgggtcacagtctactatggggtacctgtgtggaaagaagcaaaaactactctattttgtgcatcagatgctaaagcatatgagaaagaagcgcataatgtctgggctacacatgcctgtgtacccacagaccccaatccacaagaaatggttttaaaaaatgtaacagaaaatttcaacatgtggaaaaatgacatggcggatcagatgcatgaagatgtaattagtttatgggatcaaagcctcaagccatgtgtaaagttgaccccactctgtgtcactctaaactgtaccgatgctaatgctactgccagcaatgctaatgctactgccagcaataccaatgctactgtcagcaatagcagtataatagaggaaatgaaaaattgctctttcaatataaccacagaattaagagataagagagagaaaaagtatgcacttttttataaacttgatatagtacaactagatggcaactctagtcagtatagattaataaattgtaatacctcagtcataacccaagcctgtccaaaggtctcttttgacccaattcctatacattattgtgctccagctggttatgcgattctaaagtgtaataataagacattcaatggaacaggaccgtgtaataatgtcagcacagtacaatgtacacatggaattaagccagtggtttcaactcaactactgttaaatggtagcctagcagaaggagagataataattagatctgaaaatataacaaacagtgccaaaacaataatagtacatctcaatgaatctgtaaagattgagtgtacgagacccagtaataacacaagaacaagtataagaataggaccaggacaagcattttatgcaacaggacaagtaataggagacataagaaaagcacattgtaacattagtgaaagtaaatggaatgaaactttacaaagggtaagtaaaaaattaaaagaatacttccctcataagaatataacatttcaaccatcctcaggaggggacccagaaattacaacgcatagttttaattgtggaggagaatttttctattgcaatacatcaagcctgtttaataggacatacatggctaatagtacagaaactaacagtacacgaaccatcacactccactgcagaataaaacaaattataaacatgtggcaggaggtgggacgagcaatgtatgcccctcccattgcaggaaacataacatgtatatcaaatatcacaggactactattgacaagggatggaggagaaaacacaagggatggaggaaataacaatacggagacattcagacctggaggaggaaatatgaaggacaattggagaagtgaattatataaatataaagtggtagaagttaagccattaggagtagcacccactaatgcaagaaggagagtggtggagagagaaaaaagagcagtgggaatgggagctgtgttccttgggttcttgggagcggcaggaagcactatgggcgcagcatcaataacgctgacggtacaggccagacaattattgtctggtatagtgcaacagcaaagcaatttgctgaaggctatagaggctcaacagcatatgttgaaactcacggtctggggcatcaaacagctccaggcaagagtcctggccttggaaagatacctaaaggatcaacagctcctagggatgtggggctgctctggaaaactcatctgcaccactaatgtatattggaactctagttggagtaataaaacttatggtgatatttgggataacatgacctggatgcagtgggagagagaaattagcaattatacagacataatatatgacttgcttgaagaatcacaaaaccagcaggaaaagaatgaacaagatttactagcattggacagatggaacagtctgtggaattggtttaacataacaaaatggctgtggtatataaaaatattcataatgatagtaggaggcttgataggtttaagaataatttttgctgtgctttctttagtaaatagagttaggcagggatactcacctctgtcgttgcagacccttatcccaagcccgaggggaccagacaggcccggaggaatcgaagaagaaggtggagagcaagacagaaacagatcaacgcgattagtgagcggattcttagcgcttgcctgggacgacctgcggagcctgtgccttttcatctaccaccgattgagagacttcatattaattgcagcgagagcgggggaacttctgggacgcagcagtctcaagggactacggagaggatgggaagcccttaagtatctgggaggtcttgtgcagtattggggcctggaactaaaaaggagtgctattagtctattggataccctagcaatagcagtaggtgaaggaacagataggattctagaatttgtattaggaatttgtagagctatccgcaacatacctacaagaataagacagggctttgaaacagctttgctataa

SEQ ID NO: 50 - DNA, 2556 bp, Artificial Sequence
  Description of Artificial Sequence: Synthetic polynucleotide
atgagagtgatggggatacagaggagttatccacaatggtggatatggagcatgttaggcttttggatgctaatgatttgtaatgggatgtgggtcacagtctactatggggtacctgtgtggaaagaagcaaaaactactctattttgtgcatcagatgctaaagcatatgagaaagaagtgcataatgtctgggctacacatgcctgtgtacccacagaccccaatccacaagaaatggttttaaaaaatgtaacagaaaattttaacatgtggaaaaatgacatggtggatcagatgcatgaagatgtaattagtttatgggatcaaagcctcaagccatgtgtaaagttgaccccactctgcgtcactctaagctgtatcaatgctactaatgctactgacagcaataacagtatattagagggaatgaaaaattgctctttcaatataaccacagaattaagagataagagagagaaaaagaatgcacttttttataaacttgatatagtacaactatatggcaactctagtcagtatagattaataaattgtaatacctcagtcataacacaagcctgtccaaaggtctcttttgacccaattcctatacattattgtgctccagctggttatgcgattctaaagtgtaataataagacattcaatggaacaggaccgtgtaataatgtcagcacagtacaatgtactcatggaattaagccagtggtttcaactcaactattgttaaatggtagcctagcagaaggagagataataattagatctaaaaatataacagacaatggcaaaacaataatagtacatctcaatgaatctgtaaagattgagtgtacgagacccagtaataacacaagaacaagtataagaataggaccaggacaagcattttatgcaacaggacaagtaataggaaatataagagaagcacattgtaacattagtgaaagtaaatggaatgaaactttacaaagggtaagtgaaaaattaaaagaatacttccctgataagaatataacatttcaaccatcctcaggaggggacctagaaattacaacacatagctttaattgtggaggagaatttttctattgcaatacatctagcctgtttaataggacatatatggctactagtacagatatggctaatagtacagaaactaacagtacacgaatcatcacaatccactgcagaataaaacaaattataaacatgtggcaggaggtgggacgagcaatgtatgcccctcccattgcaggaaacataacatgtatatcaaatatcacaggactactattgacaagggatggaggaaacaatacagaggatacggagacattcagacctgaaggaggaaatatgaaggacaattggagaagtgaattatataaatataaagtggtagaagttaagccattaggagtagcacccactaatgcaagaaggagagtggtggagagagaaaaaagagcagtgggaatgggagctgtgttccttgggttcttgggagcggcaggaagcactatgggcgcagcatcaataacgctgacggtacaggccagacaattattgtctggtatagtgcaacagcaaagcaatttgctgaaggctatagaggctcaacagcatatgttgaaactcacggtctggggcattaaacagctccaggcaagagtcctggccttggaaagatacctaaaggatcaacagctcctagggatgtggggctgctctggaaaactcatctgcaccactaatgtatattggaactctagttggagtaataaaacttatagtgatatttgggataacatgacctggatgcagtgggagagagaaattagcaattatacagacatgatatatgaattgcttgaagaatcacaaaaccagcaggaaaagaatgaacaagatttactagcattggacagatggaacagtctgtggaattggtttaacataacaaattggctgtggtatataaaaatattcataatgatagtaggaggcttgataggtttaagaataatttttgctgtgctttctttagtaaatagagttaggcagggatactcacctctgtcattgcagacccttatcccaagcccgaggggaccagacaggcccggaggaatcgaagaagaaggtggagagcaagacagaaacagatcaacgcgattagtgagcggattcttagcgcttgcctgggacgacctgcggagcctgtgccttttcatctaccaccgattgagagacttcatattaattgcagcgagagcgggggaacttctgggacgcagcagtctcaagggactacggagagggtgggaagcccttaagtatctgggaagtcttgggcagtattggggcctggaactaaaaaggagtgctattagtctattggataccctagcaatagcagtaggtgagggaacagataggattctagaatttgtattaggaatttgtagagctatccgcaacatacctacaagaataagacagggctttgaaacagctttgctataa

SEQ ID NO: 51 - DNA, 2559 bp, Artificial Sequence
  Description of Artificial Sequence: Synthetic polynucleotide
atgagagtgatggggacacagaggaattatccacaatggtggatatggagcatgttaggcttgtggatgctaatgatttgtaatgggatgtgggtcacagtctactatggggtacctgtgtggaaagaagcaaaaactactctattttgtgcatcagatgctaaagcatatgagaaagaagtgcataatgtctgggctacacatgcctgtgtacccacagaccccaatccacaagaaatggttttaaaaaatgtaacagaaaatttcaacatgtggaaaaatgacatggcggatcagatgcatgaagatgtaattagtttatgggatcaaagcctcaagccatgtgtaaagttgaccccactctgtgtcactctatactgtatcaatgctactgccaatgctactgtcagcaatagcagtataatagaggaaatgaaaaattgctctttcaatataaccacagaattaagagataagagagagaaaaagaatgcacttttttataaacttgatatagtacaactagatggcaactctagtcagtatagattaataaattgtaatacctcagccataacacaagcctgtccaaaggtctcttttgacccaattcctatacattattgtgctccagctggttatgcgattctaaagtgtaataataagacattcaatggaacaggaccgtgtaataatgtcagcacagtacaatgtacacatggaattaagccagtggtttcaacccaactattgttaaatggtagcctagcagaaggagagataataattagatctgaaaatataacaaacagtgccaaaacaataatagtacatctcaatgaatctgtaaagattgagtgtacgagacccagtaataacacaagaacaagtataagaataggaccaggacaagcattttatgcaacaggacaagtaataggagacataagacaagcacattgtaacattagtgaaagtaaatggaatgaaactttacaaagggtaagtgaaaaattaaaagaatacttccctaataagactataacatttcaaccatcctcaggaggggacccagaaattacaacacatagctttaattgtggaggagaatttttctattgcaatacatcaagcctgtttaataggacatatatggctaatagtacagatatggctaatagtacagaaactaacagtacacgaaccatcacactccactgcagaataaaacaaattataaacatgtggcaagaggtgggacgagcaatgtatgcccctcccattgcaggaaacataacatgtatatcaaatatcacaggactactattgacaagggatggaggaaacagcagtaaggagacagagacattcagacctggaggaggaaatatgaaggacaattggagaagtgaattatataaatataaagtggtagaagttaagccattaggagtagcacccactaatgcaagaaggagagtggtggagagagaaaaaagagcagtgggaatgggagctgtgttccttgggttcttgggagcggcaggaagcactatgggcgcagcatcaataacgctgacggtacaggccagacaattattgtctggtatagtgcaacagcaaagcaatttgctgaaggctatagaggctcaacagcatatgttgaaactcacggtctggggcattaaacagctccaggcaagagtcctggccttggaaagatacctaaaggatcaacagctcctagggatgtggggctgctctggaaaactcatctgcaccactaatgtatattggaactctagttggagtaataaaacttatggtgatatttgggataacatgacctggatgcagtgggagagagaaattagcaattatacagacctaatatatgacttgcttgaagaatcacaaaaccagcaggaaaagaatgaacaagatttattagcattggacagatggaacagtctgtggaattggtttaacataacaaaatggctgtggtatataaaaatattcataatgatagtaggaggcttgataggtttaagaataatttttgctgtgctttctttagtaaatagagttaggcagggatactcacctctgtcgttgcagacccttatcccaagcccgaggggaccagacaggcccggaggaatcgaagaagaaggtggagagcaagacagaaacagatcaacgcgattagtgagcggattcttagcgcttgcctgggacgacctgcggagcctgtgccttttcctctaccaccgattgagagacttcatattaattgcagcgagagcgggggaacttctgggacgcagcagtctcaagggactacggagagggtgggaagcccttaagtatctgggaggtcttgtgcagtattggggcctggaactaaaaaggagtgctattagtctattggataccctagcaatagcagtaggtgaaggaacagataggattctagaatttgtattaggaatttgtagagctatccgcaacatacctacaagaataagacagggctttgaaacagctttgctataa

SEQ ID NO: 52 - DNA, 2574 bp, Artificial Sequence
  Description of Artificial Sequence: Synthetic polynucleotide
atgagagtgagggggatacagaggaattatccacaatggtggatatggagcatgttaggcttgtggatgctaatgatttgtaatgggatgtgggtcacagtctactatggggtacctgtgtggaaagaagcaaaaactactctattttgtgcatcagatgctaaagcatatgagaaagaagcgcataatgtctgggctacacatgcctgtgtacccacagaccccaatccacaagaaatggttttaaaaaatgtaacagaaaatttcaacatgtgggaaaatgacatggtagatcagatgcatgaagatgtaattagtttatgggatcaaagcctcaagccatgtgtaaagttgaccccactctgtgtcactctaaactgtaccgatgctaatgctactgccagcaataccaatgctactgtcagcaatatcaaggctactgtcagcaatagcagtataatagaggaaatgaaaaattgctctttcaatataaccacagaattaagagataagatagagaaaaagtatgcacttttttataaacttgatatagtacaactagatggcaactctactcagtatagattcataaattgtaatacctcagccataacacaagcctgtccaaaggtctcttttgacccaattcctatacattattgtgctccagctggttatgcgattctaaagtgtaataataagacattcaatggaacaggaccgtgtaataatgtcagcacagtacaatgtacacatggaattaagccagtggtttcaactcaactattgttaaatggtagcctagcagaaggagagataataattagatctgaaaatataacagacaatggcaaaacaataatagtacatctcaatgaatctgtaaagattgagtgtacgagacccggcaataacacaagaacaagtataagaataggaccaggacaagcattttatgcaacaggacaagtaataggagacataagacaagcacattgtaacattagtgaaagtaaatggaatgaaactttacaaagggtaagtgaaaaattaaaagaatacttccctaataagactataacatttcaaccatcctcaggaggggacccagaaattacaacacatagctttaattgtggaggagaatttttttattgcaatacatcaagcctgtttaataggacatacatggctaatagtacagaaactaacagtacacgaaccatcacactccactgcagaataaaacaaattataaacatgtggcaggaggtgggacgagcaatgtatgcccctcccattgcaggaaacataacatgtatatcaaatatcacaggactactattgacaagggatggaggaaacactacggatatagagacattcagacctggaggaggaaatatgaaggacaattggagaagtgaattatataaatataaagtggtagaagttaagccattaggagtagcacccactaaggcaagaaggagagtggtggagagagaaaaaagagcagtgggaatgggagctgtgttccttgggttcttgggagcggcaggaagcactatgggcgcagcatcgataacgctgacggtacaggccagacaattattgtctggtatagtgcaacagcaaagcaatttgctgaaggctatagaggctcaacagcatatgttgaaactcacggtctggggcattaaacagctccaggcaagagtcctggccttggaaagatacctaaaggatcaacagctcctagggatgtggggctgctctggaaaactcatctgcaccactaatgtatattggaactctagttggagtaataaaacttatgatgatatttgggataacatgacctggatgcagtgggagagagaaattagcaattacacagaaataatatatgacttgcttgaagaatcacaaaaccagcaggaaaagaatgaacaagatttactagcattggacaggtggaacagtctgtggaattggtttaacataacaaaatggctgtggtatataaaaatattcataatgatagtaggaggcttgataggtttaagaataatttttgctgtgctttctttagtaaatagagttaggcagggatactcacctctgtcgttgcagacccttatcccaagcccgaggggaccagacaggcccggaggaatcgaagaagaaggtggagagcaagacagaaacagatcaacgcgattagtgagcggattcttagcgcttgcctgggacgacctgcggagcctgtgccttttcatctaccaccgattgagagacttcatattaattgcagcgagagcgggggaacttctgggacgcagcagtctcaagggactacggagagggtgggaagcccttaagtatctgggaggtattgtgcagtattggggcctggaactaaaaaggagtgctattagtctattggataccctagcaatagcagtaggtgaaggaacagataggattctagaatttgtattaggaatttgtagagctatccgcaacatacctacaagaataagacagggctttgaaacagctttgctataa

SEQ ID NO: 53 - DNA, 2577 bp, Artificial Sequence
  Description of Artificial Sequence: Synthetic polynucleotide
atgagagtgatggggagacagaggaattatccacaatggtggatatggagcatgttaggcttgtggatgctaatgatttgtaatgggatgtgggtcacagtctactatggggtacctgtgtggaaagaagcaaaaactactctattttgtgcatcagatgctaaagcatatgagaaagaagtgcataatgtctgggctacacatgcctgtgtacccacagaccccaatccacaagaaatggttttaaaaaatgtaacagaaaatttcaacatgtggaaaaatgacatggtggatcagatgcatgaagatgtaattagtttatgggatcaaagcctcacgccatgtgtaaagttgaccccactctgtgtcactctaaactgtaccgatgctaatgatactgccagcaatagcagtataataaagggaatgaataacagtatagtaggggaaatgaaaaattgctctttcaatataaccacagaattaagagataagagagagaaaaagaatgcacttttttataaacttgatatagtacaactagatggcaactctagtgagtatagattaataaattgtaatacctcagtcataacacaagcctgtccaaaggtctcttttgacccaattcctatacattattgtgctccagctggttatgcgattctaaagtgtaataataagacattcaatggaacaggaccgtgtaataatgtcagcacagtacaatgtacacatggaattaagccagtggtttcaactcaactattgttaaatggtagcctagcagaaggagagataataattagatctgaaaatataacagacaatgccaaaacaataatagtacatctcaatgaatctgtaaagattgagtgtacgagacccagtaataacacaagaacaagtataagaataggaccaggacaagcattttatgcaacaggacaagtaataggagacataagaaaagcacattgtaacattagtgaaagtaaatggaatgaaactttacaaagggtaagtaaaaaattaaaagaatacttccctgataagaatataacatttcaaccatcctcaggaggggacccagaaattacaacacatagctttaattgtggaggagaatttttctattgcaatacatcaagcctgtttaataggacatatatggctaatagtacagatatggctaatagtgcagaaactaacagtacaagaaccatcacactccactgcagaataaaacaaattataaacatgtggcaggaggtgggacgagcaatgtatgcccctcccattgcaggaaacataacatgtatatcaaatatcacaggactactattgacaagggatggaggaaacagcagtacggagacagagacattcagacctggaggaggaaatatgaaggacaattggagaagtgaattatataaatataaagtggtagaagttaagccattaggagtagcacccactaatgcaagaaggagagtggtggagagagaaaaaagagcagtgggaatgggagctgtgttccttgggttcttgggagcggcaggaagcactatgggcgcagcatcaataacgctgacggtacaggccagacaattattgtctggcatagtgcaacagcaaagcaatttgctgaaggctatagaggctcaacagcatatgttgagactcacggtctggggcattaaacagctccaggcaagagtcctggccttggaaagatacctaaaggatcaacagctcctagggatgtggggctgctctggaaaactcatctgcaccactaatgtatattggaactctagttggagtaataaaacttatgatgatatttgggataacatgacctggatgcagtgggagggagaaattagcaattatacaaacataatatatgacttgcttgaagaatcacaaaaccagcaggaaaagaatgaacaagatttactagcattggacagatggaacagtctgtggaattggtttaacataacaaattggctgtggtatataaaaatattcataatgatagtaggaggcttgataggtttaagaataatttttgctgtgctttctttagtaaatagagttaggcagggatactcacctctgtcgttgcagacccttatcccaagcccgaggggaccagacaggcccggaggaatcgaagaagaaggtggagagcaagacagaaagagatcaacgcgattagtgagcggattcttagcgcttgtctgggacgacctgcggagcctgtgccttttcctctaccaccgattgagagacttcatattaattgcagcgagagcgggggaacttctgggacgcagcagtctcaagggactacggagagggtgggaagcccttaagtatctgggaagtcttgtgcagtattggggcctggaactaaaaaggagtgctattagtctattggataccctagcaatagcagtaggtgaaggaacagataggattctagaatttgtattaggaatttgtagagctatccgcaacatacctacaagaataagacagggctttgaaacagctttgctataa

SEQ ID NO: 54 - DNA, 2589 bp, Artificial Sequence
  Description of Artificial Sequence: Synthetic polynucleotide
atgagagtgatggggagacagaggaattatccacaatggtggatatggagcacgttaggcttgcggatgctaatgatttgtaatgggatgtgggtcacagtctactatggggtacctgtgtggaaagaagcaaaaactactctattttgtgcatcagatgctaaagcatatgagaaagaagtgcataatgtctgggctacacatgcctgtgtacccacagaccccaatccacaagaaatggttttaaaaaatgtaacagaaaatttcaacatgtgggaaaatgacatggtggatcagatgcatgaagatgtaattagtttatgggatcaaagcctcaagccatgtgtaaagttgaccccactctgtgtcactctaaactgtaccgatgctaatgctactgccagcaatgctaatgctactgtcagcaataccaatgctactgtcagcaatgatagcagtataatagaggaaatgaaaaattgctctttcaatataaccacagaattaagagataagatagagaaaaagtatgcacttttttataaacttgatatagtacaactagatggcaactctactcattatagattcataaattgtaatacctcagccataacacaagcctgtccaaaggtctcttttgacccaattcctatacattattgtgctccagctggttatgcgattctaaagtgtaataataagacattcaatggaacaggaccgtgtaataatgtcagcacagtacaatgtacacatggaattaagccagtggtttcaactcaactattgttaaatggtagcctagcagaaggagagataataattagatctgaaaatataacagacaatgccaaaacaataatagtacatctcaatgaatctgtaaagattgagtgtacgagacccagtaataacacaagaacaagtataggaataggaccaggacaagcattttatgcaacaggacaagtaataggagacataagaaaagcacattgtaacattagtgaaagtaaatggaatgaaactttacaaagggtaagtaaaaaattaaaagaatacttccctggtaagaatataacatttcaaccatcctcaggaggggacccagaagttacaacacatagctttaattgtggaggagaatttttctattgcaatacatcaagcctgtttaataggacatatatgactaatagtacagatatggctaatagtacagaaactaacagaaccatcacaatccactgcagaataaaacaaattataaacatgtggcaagaggtgggacgagcaatgtatgcccctcccattgcaggaaacataacatgtatatcaaatatcacaggactactattgacaagggatggaggaaacaatacggatccggagatattcagacctggaggaggaaatatgaaggacaattggagaagtgaattatataaatataaagtggtagaagttaagccattaggagtagcacccactaatgcaagaaggagagtggtggagagagaaaaaagagcagtgggaatgggagctgtgttccttgggttcttgggagcggcaggaagcactatgggcgcagcgtcaataacgctgacggtacaggccagacaactattgtctggtatagtgcaacagcaaagcaatttgctgaaggctatagaggctcaacagcacatgttgagactcacggtctggggcattaaacagctccaggcaagagtcctggccttggaaagatacctaaaggatcaacagctcctagggatgtggggctgctctggaaaactcatttgcaccactaatgtatattggaactctagttggagtaataaaacttatggtgatatttgggataacatgacctggatgcagtgggagagcgaaattagcaattatacaaacataatatatgatttgcttgaagaatcacaaaaccagcaggaaaagaatgaacaagatttactagcattggacagatggaacagtctgtggaattggtttaacataacaaaatggctgtggtatataaaaatattcataatgatagtaggaggcttgataggtttaagaataatttttgctgtgctttctttagtaaatagagttaggcagggatactcacctctgtcgttgcagacccttatcccaagcccgaggggaccagacaggcccggaggaatcgaagaagaaggtggagagcaagacagaaagagatcaacgcgattagtgagcggattcttagcgcttgtctgggacgacctgcggagcctgtgccttttcctctaccaccgattgagagacttcatattaattgcagcgagagcgggggaacttctgggacgcagcagtctcaagggactacggagagggtgggaagcccttaagtatctgggaagtcttgtgcagtattggggcctggaactaaaaaggagtgctattagtctattggataccctagcaatagcagtaggtgaaggaacagataggattctagaatttgtattaggaatttgtagagctatccgcaacatacctacaagaataagacagggctttgaaacagctttgctataa

SEQ ID NO: 55 - protein, 840 aa, Artificial Sequence
  Description of Artificial Sequence: Synthetic polypeptide
MRVMGIQRNYPQWWIWSMLGFWMLMICNGMWVTVYYGVPVWKEAKTTLFCASDAKAYEKEVHNVWATHACVPTDPNPQEMVLKNVTENFNMWKNDMVDQMHEDVISLWDQSLKPCVKLTPLCVTLNCTNATASNSSIIEGMKNCSFNITTELRDKREKKNALFYKLDIVQLDGNSSQYRLINCNTSVITQACPKVSFDPIPIHYCAPAGYAILKCNNKTFTGTGPCNNVSTVQCTHGIKPVVSTQLLLNGSLAEGEIIIRSENITNNVKTIIVHLNESVKIECTRPNNKTRTSIRIGPGQAFYATGQVIGDIREAYCNINESKWNETLQRVSKKLKEYFPHKNITFQPSSGGDLEITTHSFNCGGEFFYCNTSSLFNRTYMANSTETNSTRTITIHCRIKQIINMWQEVGRAMYAPPIAGNITCISNITGLLLTRDGGKNNTETFRPGGGNMKDNWRSELYKYKVVEVKPLGVAPTNARRRVVEREKRAVGMGAVFLGFLGAAGSTMGAASITLTVQARQLLSGIVQQQSNLLKAIEAQQHMLKLTVWGIKQLQARVLALERYLKDQQLLGMWGCSGKLICTTNVYWNSSWSNKTYGDIWDNMTWMQWEREISNYTEIIYELLEESQNQQEKNEQDLLALDRWNSLWNWFNITNWLWYIKIFIMIVGGLIGLRIIFAVLSLVNRVRQGYSPLSLQTLIPSPRGPDRPGGIEEEGGEQDRNRSTRLVSGFLALVWDDLRSLCLFIYHRLRDFILIAARAGELLGRSSLKGLRRGWEALKYLGSLVQYWGLELKRSAISLLDTLAIAVGEGTDRILEFVLGICRAIRNIPTRIRQGFETALL

SEQ ID NO: 56 - protein, 846 aa, Artificial Sequence
  Description of Artificial Sequence: Synthetic polypeptide
MRVMGIQRNYPQWWIWSMLGFWMLMICNGMWVTVYYGVPVWKEAKTTLFCASDAKAYEKEVHNVWATHACVPTDPNPQEMVLKNVTENFNMWKNDMVDQMHEDVISLWDQSLKPCVKLTPLCVTLNCTNATASNSSIIEGMKNCSFNITTELRDRREKKNALFYKLDIVQLDGNSSQYRLINCNTSVITQACPKVSFDPIPIHYCAPAGYAILKCNNKTFTGTGPCNNVSTVQCTHGIKPVVSTQLLLNGSLAEGEIIIRSENITKNVKTIIVHLNESVKIECTRPNNKTRTSIRIGPGQAFYATGQVIGDIREAYCNINESKWNETLQRVSKKLKEYFPHKNITFQPSSGGDLEITTHSFNCGGEFFYCNTSSLFNRTYMANSTDMANSTETNSTRTITIRCRIKQIINMWQEVGRAMYAPPIAGNITCISNITGLLLTRDGGKNNTETFRPGGGNMKDNWRSELYKYKVVEVKPLGVAPTNARRRVVEREKRAVGMGAVFLGFLGAAGSTMGAASITLTVQARQLLSGIVQQQSNLLKAIEAQQHMLKLTVWGIKQLQARVLALERYLKDQQLLGMWGCSGKLICTTNVYWNSSWSNKTYGDIWDNMTWMQWEREISNYTEIIYELLEESQNQQEKNEQDLLALDRWNSLWNWFNITNWLWYIKIFIMIVGGLIGLRIIFAVLSLVNRVRQGYSPLSLQTLIPSPRGPDRPGGIEEEGGEQDRNRSTRLVSGFLALVWDDLRSLCLFIYHRLRDFILIAARAGELLGRSSLKGLRRGWEALKYLGSLVQYWGLELKRSAISLLDTLAIAVGEGTDRILEFVLGICRAIRNIPTRIRQGFETALL

SEQ ID NO: 57 - protein, 846 aa, Artificial Sequence
  Description of Artificial Sequence: Synthetic polypeptide
MRVMGIQRNYPQWWIWSMLGFWMLMICNGMWVTVYYGVPVWKEAKTTLFCASDAKAYEKEVHNVWATHACVPTDPNPQEMVLKNVTENFNMWKNDMVDQMHEDVISLWDQSLKPCVKLTPLCVTLNCTNATASNSSIIEGMKNCSFNITTELRDKREKKNALFYKLDIVQLDGNSSQYRLINCNTSVITQACPKVSFDPIPIHYCAPAGYAILKCNNKTFTGTGPCNNVSTVQCTHGIKPVVSTQLLLNGSLAEGEIIIRSENITNNVKTIIVHLNESVKIECTRPNNKTRTSIRIGPGQAFYATGQVIGDIREAYCNINESKWNETLQRVSKKLKEYFPHKNITFQPSSGGDLEITTHSFNCGGEFFYCNTSSLFNRTYMANSTDMANSTETNSTQTITIHCRIKQIINMWQEVGRAMYAPPIAGNITCISNITGLLLTRDGGKNNTETFRPGGGNMKDNWRSELYKYKVVEVKPLGVAPTNARRRVVEREKRAVGMGAVFLGFLGAAGSTMGAASITLTVQARQLLSGIVQQQSNLLKAIEAQQHMLKLTVWGIKQLQARVLALERYLKDQQLLGMWGCSGKLICTTNVYWNSSWSNKTYGDIWDNMTWMQWEREISNYTEIIYELLEESQNQQEKNEQDLLALDRWNSLWNWFNITNWLWYIKIFIMIVGGLIGLRIIFAVLSLVNRVRQGYSPLSLQTLIPSPRGPDRPGGIEEEGGEQDRNRSTRLVSGFLALVWDDLRSLCLFIYHRLRDFILIAARAGELLGRSSLKGLRRGWEALKYLGSLVQYWGLELKRSAISLLDTLAIAVGEGTDRILEFVLGICRAIRNIPTRIRQGFETALL

SEQ ID NO: 58 - protein, 846 aa, Artificial Sequence
  Description of Artificial Sequence: Synthetic polypeptide
MRVMGIQRNYPQWWIWSMLGFWMLMICNGMWVTVYYGVPVWKEAKTTLFCASDAKAYEKEVHNVWATHACVPTDPNPQEMVLKNVTENFNMWKNDMVDQMHEDVISLWDQSLKPCVKLTPLCVTLNCTNATASNSRIIEGMKNCSFNITTELRDKREKKNALFYKLDIVQLDGNSSQYRLINCNTSVITQACPKVSFDPIPIHYCAPAGYAILKCNNKTFTGTGPCNNVSTVQCTHGIKPVVSTQLLLNGSLAEGEIIIRSENITNNVKTIIVHLNESVKIECTRPNNKTRTSIRIGPGQAFYATGQVIGDIREAYCNINESKWNETLQRVSKKLKEYFPHKNITFQPSSGGDLEITTHSFNCGGEFFYCNTSSLFNRTYMANSTDMANSTETNSTRTIIIHCRIKQIINMWQEVGRAMYAPPIAGNITCISNITGLLLTRDGGKNNTETFRPGGGNMKDNWRSELYKYKVVEVKPLGVAPTNARRRVVEREKRAVGMGAVFLGFLGAAGSTMGAASITLTVQARQLLSGIVQQQSNLLKAIEAQQHMLKLTVWGIKQLQARVLALERYLKDQQLLGMWGCSGKLICTTNVYWNSSWSNKTYGDIWDNMTWMQWEREISNYTEIIYELLEESQNQQEKNEQDLLALDRWNSLWNWFNITNWLWYIKIFIMIVGGLIGLRIIFAVLSLVNRVRQGYSPLSLQTLIPSPRGPDRPGGIEEEGGEQDRNRSTRLVSGFLALVWDDLRSLCLFIYHRLRDFILIAARAGELLGCSSLKGLRRGWEALKYLGSLVQYWGLELKRSAISLLDTLAIAVGEGTDRILEFVLGICRAIRNIPTRIRQGFETALL

SEQ ID NO: 59 - protein, 846 aa, Artificial Sequence
  Description of Artificial Sequence: Synthetic polypeptide
MRVMGIQRNYPQWWIWSMLGFWMLMICNGMWVTVYYGVPVWKEAKTTLFCASDAKAYEKEVHNVWATHACVPTDPNPQEMVLKNVTENFNMWKNDMVDQMHEDVISLWDQSLKPCVKLTPLCVTLNCTNATASNSSIIEGMKNCSFNITTELRDKREKKNALFYKLDIVQLDGNSSQYRLINCNTSVITQACPKVSFDPIPIHYCAPAGYAILKCNNKTFTGTGPCNNVSTVQCTHGIKPVVSTQLLLNGSLAEGEIIIRSENITNNVKTIIVHLNESVKIECTRPNNKTRTSIRIGPGQAFYATGQVIGDIREAYCNINESKWNETLQRVSKKLKEYFPHKNITFQPSSGGDLEIITHSFNCGGEFFYCNTSSLFNRTYMANSTDMANSTETNSTRIITIHCRIKQIINMWQEVGRAMYAPPIAGSITCISNITGLLLTRDGGKNNMETFRPGGGNMKDNWRSELYKYKVVEVKPLGVAPTNARRRVVEREKRAVGMGAVFLGFLGAAGSTMGAASITLTVQARQLLSGIVQQQSNLLKAIEAQQHMLKLTVWGIKQLQARVLALERYLKDQQLLGMWGCSGKLICTTNVYWNSSWSNKTYGDIWDNMTWMQWEREISNYTEIIYELLEESQNQQEKNEQDLLALDRWNSLWNWFNITNWLWYIKIFIMIVGGLIGLRIIFAVLSLVNRVRQGYSPLSLQTLIPSPRGPDRPGGIEEEGGEQDRNRSTRLVSGFLALVWDDLRSLCLFIYHRLRDFILIAARAGELLGRSSLKGLRRGWEALKYLGSLVQYWGLELKRSAISLLDTLAIAVGEGTDRILEFVLGICRAIRNIPTRIRQGFETALL

SEQ ID NO: 60 - protein, 846 aa, Artificial Sequence
  Description of Artificial Sequence: Synthetic polypeptide
MRVMGIQRNYPQWWIWSMLGFWMLMICNGMWVTVYYGVPVWKEAKTTLFCASDAKAYEKEVHNVWATHACVPTDPNPQEMVLKNVTENFNMWKNDMVDQMHEDVISLWDQSLKPCVKLTPLCVTLNCTNATASNSSIIEGMKNCSFNITTELRDKREKKNALFYKLDIVQLDGNSSQYRLINCNTSVITQACPKVSFDPIPIHYCAPAGYAILRCNNKTFTGTGPCNNVSTVQCTHGIKPVVSTQLLLNGSLAEGEIIIRSENITNNAKTIIVHLNESVKIECTRPNNKTRTSIRIGPGQAFYATGQVIGDIREAYCNINESKWNETLQRVSKKLKEYFPHKNITFQPSSGGDLEITTHSFNCGGEFFYCNTSSLFNRTYMANSTDMANSTETNSTRTITLHCRIKQIINMWQEVGRAMYAPPIAGNITCISNITGLLLTRDGGKNNTETFRPGGGNMKDNWRSELYKYKVVEVKPLGVAPTNARRRVVEREKRAVGMGAVFLGFLGAAGSTMGAASITLTVQARQLLSGIVQQQSNLLKAIEAQQHMLKLTVWGIKQLQARVLALERYLKDQQLLGMWGCSGKLICTTNVYWNSSWSNKTYGDIWDNMTWMQWEREISNYTEIIYELLEESQNQQEKNEQDLLALDRWNSLWNWFNITNWLWYIKIFIMIVGGLIGLRIIFAVLSLVNRVRQGYSPLSLQTLIPSPRGPDRPGGIEEEGGEQDRNRSTRLVSGFLALVWDDLRSLCLFIYHRLRDFILIAARAGELLGRSSLKGLRRGWEALKYLGSLVQYWGLELKRSAISLLDTLAIAVGEGTDRILEFVLGICRTIRNIPTRIRQGFETALL

SEQ ID NO: 61 - protein, 846 aa, Artificial Sequence
  Description of Artificial Sequence: Synthetic polypeptide
MRVMGIQRNYPQWWIWSMLGFWMLMICNGMWVTVYYGVPVWKEAKTTLFCASDAKAYEKEVHNVWATHACVPTDPNPQEMVLKNVTENFNMWKNDMVDQMHEDVISLWDQSLKPCVKLTPLCVTLNCTNATASNSSIIEGMKNCSFNITTELRDKREKKNALFYKLDIVQLDGNSSQYRLINCNTSVITQACPKVSFDPIPIHYCAPAGYAILKCNNKTFTGTGPCNNVSTVQCTHGIKPVVSTQLLLNGSLAEGEIIIRSENITNNGKTIIVHLNESVKIECTRPNNKTRTSIRIGPGQAFYATGQVIGDIREAYCNINESKWNETLQRVSKKLKEYFPHKNITFQPSSGGDLEITTHSFNCGGEFFYCNTSSLFNRTYMANSTDMANSTETNSTRTITIHCRIKQIINMWQEVGRAMYAPPIAGNITCISNITGLLLTRDGGKNNTETFRPGGGNMKDNWRSELYKYKVVEVKPLGVAPTNARRRVVEREKRAVGMGAVFLGFLGAAGSTMGAASITLTVQARQLLSGIVQQQSNLLKAIEAQQHMLKLTVWGIKQLQARVLALERYLKDQQLLGMWGCSGKLICTTNVYWNSSWSNKTYGDIWDNMTWMQWEREISNYTEIIYELLEESQNQQEKNEQDLLALDRWNSLWNWFNITNWLWYIKIFIMIVGGLIGLRIIFAVLSLVNRVRQGYSPLSLQTLIPSPRGPDRPGGIEEEGGEQDRNRSTRLVSGFLALVWDDLRSLCLFIYHRLRDFILIAARAGELLGRSSLKGLRRGWEALKYLGSLVQYWGLELKRSAISLLDTLAIAVGEGTDRILEFVLGICRAIRNIPTRIRQGFETALL

SEQ ID NO: 62 - protein, 846 aa, Artificial Sequence
  Description of Artificial Sequence: Synthetic polypeptide
MRVMGIQRNYPQWWIWSMLGFWMLMICNGMWVTVYYGVPVWKEAKTTLFCASDAKAYEKEVHNVWATHACVPTDPNPQEMVLKNVTENFNMWKNDMVDQMHEDVISLWDQSLKPCVKLTPLCVTLNCTNATASNSSIIEGMKNCSFNITTELRDKREKKNALFYKLDIVQLDGNSSQYRLINCNTSVITQACPKVSFDPIPIHYCAPAGYAILKCNNKTFTGTGPCNNVSTVQCTHGIKPVVSTQLLLNGSLAEGEIIIRSENITNNVKTIIVHLNESVKIECTRPNNKTRTSIRIGPGQAFYATGQVIGDIREAYCNINESKWNETLQRVSKKLKEYFPHKNITFQPSSGGDLEITTHSFNCGGEFFYCNTSSLFNRTYMANSTDMANSTETNSTRTITINCRIKQIINMWQEVGRAMYAPPIAGNITCISNITGLILTRDGGKNNTETFRPGGGNMKDNWRSELYKYKVVEVKPLGVAPTNARRRVVEREKRAVGMGAVFLGFLGAAGSTMGAASITLTVQARQLLSGIVQQQSNLLKAIEAQQHMLKLTVWGIKQLQARVLALERYLKDQQLLGMWGCSGKLICTTNVYWNSSWSNKTYGDIWDNMTWMQWEREISNYTEIIYELLEESQNQQEKNEQDLLALDRWNSLWNWFNITNWLWYIKIFIMIVGGLIGLRIIFAVLSLVNRVRQGYSPLSLQTLIPSPRGPDRPGGIEEEGGEQDRNRSTRLVSGFLALVWDDLRSLCLFIYHRLRDFILIAARAGELLGRSSLKGLRRGWEALKYLGSLVQYWGLELKRSAISLLDTLAIAVGEGTDRILEFVLGICRAIRNIPTRIRQGFETALL

SEQ ID NO: 63 - protein, 851 aa, Artificial Sequence
  Description of Artificial Sequence: Synthetic polypeptide
MRVMGIQRNYPQWWIWSMLGFWMLMICNGMWVTVYYGVPVWKEAKTTLFCASDAKAYEKEVHNVWATHACVPTDPNPQEMVLKNVTENFNMWKNDMVDQMHEDVISLWDQSLKPCVKLTPLCVTLNCTNATASNATASNSSIIEGMKNCSFNITTELRDKREKKNALFYKLDIVQLDGNSSQYRLINCNTSVITQACPKVSFDPIPIHYCAPAGYAILKCNNKTFTGTGPCNNVSTVQCTHGIKPVVSTQLLLNGSLAEGEIIIRSENITNNAKTIIVHLNESVKIECTRPNNKTRTSIRIGPGQAFYATGQVIGDIREAHCNISESKWNETLQRVSKKLKEYFPHKNITFQPSSGGDLEITTHSFNCGGEFFYCNTSSLFNRTYMANSTDMANSTETNSTRIITIHCRIKQIINMWQEVGRAMYAPPIAGNITCISNITGLLLTRDGGKNNTETFRPGGGNMKDNWRSELYKYKVVEVKPLGVAPTNARRRVVEREKRAVGMGAVFLGFLGAAGSTMGAASITLTVQARQLLSGIVQQQSNLLKAIEAQQHMLKLTVWGIKQLQARVLALERYLKDQQLLGMWGCSGKLICTTNVYWNSSWSNKTYGDIWDNMTWMQWEREISNYTEIIYELLEESQNQQEKNEQDLLALDRWNSLWNWFNITNWLWYIKIFIMIVGGLIGLRIIFAVLSLVNRVRQGYSPLSLQTLIPSPRGPDRPGGIEEEGGEQDRNRSTRLVSGFLALVWDDLRSLCLFIYHRLRDFILIAARAGELLGRSSLKGLRRGWEALKYLGSLVQYWGLELKRSAISLLDTLAIAVGEGTDRILEFVLGICRAIRNIPTRIRQGFETALL

SEQ ID NO: 64 - protein, 850 aa, Artificial Sequence
  Description of Artificial Sequence: Synthetic polypeptide
MRVMGIQRNYPQWWIWSMLGFWMLMICNGMWVTVYYGVPVWKEAKTTLFCASDAKAYEKEVHNVWATHACVPTDPNPQEMVLKNVTENFNMWKNDMVDQMHEDVISLWDQSLKPCVKLTPLCVTLNCTNATTNATASNSSIIEGMKNCSFNITTELRDKREKKNALFYKLDIVQLDGNSSQYRLINCNTSVITQACPKVSFDPIPIHYCAPAGYAILKCNNKTFTGTGPCNNVSTVQCTHGIKPVVSTQLLLNGSLAEGEIIIRSENITNNAKTIIVHLNESVKIECTRPSNKTRTSIRIGPGQAFYATGQVIGDIREAYCNISESKWNETLQRVSKKLKEYFPHKNITFQPSSGGDLEITTHSFNCGGEFFYCNTSSLFNRTYMANSTDMANSTETNSTRTITIRCRIKQIINMWQEVGRAMYAPPIAGNITCISNITGLLLTRDGGKTNTETFRPGGGNMKDNWRSELYKYKVVEVKPLGVAPTNARRRVVEREKRAVGMGAVFLGFLGAAGSTMGAASITLTVQARQLLSGIVQQQSNLLKAIEAQQHMLKLTVWGIKQLQARVLALERYLKDQQLLGMWGCSGKLICTTNVYWNSSWSNKTYGDIWDNMTWMQWEREISNYTEIIYELLEESQNQQEKNEQDLLALDRWNSLWNWFNITNWLWYIKIFIMIVGGLIGLRIIFAVLSLVNRVRQGYSPLSLQTLIPSPRGPDRPGGIEEEGGEQDRNRSTRLVSGFLALVWDDLRSLCLFIYHRLRDFILIAARAGELLGRSSLKGLRRGWEALKYLGSLVQYWGLELKRSAISLLDTLAITVGEGTDRILEFVLGICRAIRNIPTRIRQGFETALL

SEQ ID NO: 65 - protein, 845 aa, Artificial Sequence
  Description of Artificial Sequence: Synthetic polypeptide
MRVMGIQRNYPQWWIWSMLGFWMLMICNGMWVTVYYGVPVWKEAKTTLFCASDAKAYEKEVHNVWATHACVPTDPNPQEMVLKNVTENFNMWKNDMVDQMHEDVISLWDQSLKPCVKLTPLCVTLNCTNATASNSSIEGMKNCSFNITTELRDKREKKNALFYKLDIVQLDGNSSQYRLINCNTSVITQACPKVSFDPIPIHYCAPAGYAILKCNNKTFTGTGPCNNVSTVQCTHGIKPVVSTQLLLNGSLAEGEIIIRSENITNNGKTIIVHLNESVKIECTRPNNKTRTSIRIGPGQAFYATGQVIGDIREAYCNISESKWNETLQRVSKKLKEYFPHKNITFQPSSGGDLEITTHSFNCGGEFFYCNTSSLFNRTYMANSTDMANSTETNSTRIITIHCRIKQIINMWQEVGRAMYAPPIAGNITCISNITGLLLTRDGGKNNTETFRPGGGNMKDNWRSELYKYKVVEVKPLGVAPTNARRRVVEREKRAVGMGAVFLGFLGAAGSTMGAASITLTVQARQLLSGIVQQQSNLLKAIEAQQHMLKLTVWGIKQLQARVLALERYLKDQQLLGMWGCSGKLICTTNVYWNSSWSNKTYGDIWDNMTWMQWEREISNYTEIIYELLEESQNQQEKNEQDLLALDRWNSLWNWFNITNWLWYIKIFIMIVGGLIGLRIIFAVLSLVNRVRQGYSPLSLQTLIPSPRGPDRPGGIEEEGGEQDRNRSTRLVSGFLALVWDDLRSLCLFIYHRLRDFILIAARAGELLGRSSLKGLRRGWEALKYLGSLVQYWGLELKRSTISLLDTLAIAVGEGTDRILEFVLGICRAIRNIPTRIRQGFETALL

SEQ ID NO: 66 - protein, 846 aa, Artificial Sequence
  Description of Artificial Sequence: Synthetic polypeptide
MRVMGIQRNYPQWWIWSMLGFWMLMICNGMWVTVYYGVPVWKEAKTTLFCASDAKAYEKEVHNVWATHACVPTDPNPQEMVLKNVTENFNMWKNDMVDQMHEDVISLWDQSLKPCVKLTPLCVTLNCTNATASNSSIIEEMKNCSFNIITELRDKREKKNALFYKLDIVQLDGNSSQYRLINCNTSVITQACPKVSFDPIPIHYCAPAGYAILKCNNKTFTGTGPCNNVSTVQCTHGIKPVVSTQLLLNGSLAEGEIIIRSENITNNVKTIIVHLNESVKIECTRPNNKTRTSIRIGPGQAFYATGQVIGDIREAYCNINESKWNETLQRVSKKLKEYFPHKNITFQPSSGGDLEITTHSFNCGGEFFYCNTSSLFNRTYMANSTDMANSTETNSTRNITIHCRIKQIINMWQEVGRAMYAPPIAGNITCISNITGLLLTRDGGKNNTETFRPGGGNMKDNWRSELYKYKVVEVKPLGVAPTNARRRVVEREKRAVGMGAVFLGFLGAAGSTMGAASITLTVQARQLLSGIVQQQSNLLKAIEAQQHMLKLTVWGIKQLQARVLALERYLKDQQLLGMWGCSGKLICTTNVYWNSSWSNKTYGDIWDNMTWMQWEREISNYTEIIYELLEESQNQQEKNEQDLLALDRWNSLWNWFNITNWLWYIKIFIMIVGGLIGLRIIFAVLSLVNRVRQGYSPLSLQTLIPSPRGPDRPGGIEEEGGEQDRNRSTRLVSGFLALVWDDLRSLCLFIYHRLRDFILIAARAGELLGRSSLKGLRRGWEALKYLGSLVQYWGLELKRSAISLLDTLAIAVGEGTDRILEFVLGICRAIRNIPTRIRQGFETALL

SEQ ID NO: 67 - protein, 847 aa, Artificial Sequence
  Description of Artificial Sequence: Synthetic polypeptide
MRVMGIQRNYPQWWIWSMLGFWMLMICNGMWVTVYYGVPVWKEAKTTLFCASDAKAYEKEVHNVWATHACVPTDPNPQEMVLKNVTENFNMWKNDMVDQMHEDVISLWDQSLKPCVKLTPLCVTLNCTNATSNSSIIEEMKNCSFNITTELRDKREKKNALFYKLDIVQLDGNSSQYRLINCNTSVITQACPKVSFDPIPIHYCAPAGYAILKCNNKTFTGTGPCNNVSTVQCTHGIKPVVSTQLLLNGSLAEGEIIIRSENITNNGKTIIVHLNESVKIECTRPNNNTRTSIRIGPGQAFYATGQVIGDIREAYCNISESKWNETLQRVSKKLKEYFPHKNITFQPSSGGDLEITTHSFNCGGEFFYCNTSSLFNRTYMANSTDMANSTETNSTRTITIRCRIKQIINMWQEVGRAMYAPPIAGNITCISNITGLLLTRDGGKNNTDTETFRPGGGNMKDNWRSELYKYKVVEVKPLGVAPTNARRRVVEREKRAVGMGAVFLGFLGAAGSTMGAASITLTVQARQLLSGIVQQQSNLLKAIEAQQHMLKLTVWGIKQLQARVLALERYLKDQQLLGMWGCSGKLICTTNVYWNSSWSNKTYGDIWDNMTWMQWEREISNYTEIIYELLEESQNQQEKNEQDLLALDRWNSLWNWFNITNWLWYIKIFIMIVGGLIGLRIIFAVLSLVNRVRQGYSPLSLQTLIPSPRGPDRPGGIEEEGGEQDRNRSTRLVSGFLALVWDDLRSLCLFIYHRLRDFILIAARAGELLGRSSLKGLRRGWEALKYLGSLVQYWGLELKRSAISLLDTLAIAIGEGTDRILEFVLGICRAIRNIPTRIRQGFETALL

SEQ ID NO: 68 - protein, 858 aa, Artificial Sequence
  Description of Artificial Sequence: Synthetic polypeptide
MRVMGIQRNYPQWWIWSMLGFWMLMICNGMWVTVYYGVPVWKEAKTTLFCASDAKAYEKEVHNVWATHACVPTDPNPQEMVLKNVTENFNMWKNDMVDQMHEDVISLWDQSLKPCVKLTPLCVTLNCTNATASNSSINCTNATASNSSIIEGMKNCSFNITTELRDKREKKNALFYKLDIVQLDGNSSQYRLINCNTSVITQACPKVSFDPIPIHYCAPAGYAILKCNNKTFTGTGPCNNVSTVQCTHGIKPVVSTQLLLNGSLAEGEIIIRSENITNNGKTIIVHLNESVKIECTRPNNKTRTSIRIGPGQAFYATGQVIGDIREAYCNISESKWNETLQRVSKKLKEYFPHKNITFQPSSGGDLEITTHSFNCGGEFFYCNTSSLFNRTYMANSTDMANSTETNSTRTITIRCRIKQIINMWQEVGRAMYAPPIAGNITCISNITGLLLTRDGGKNDTETFRPGGGNMKDNWRSELYKYKVVEVKPLGVAPTNARRRVVEREKRAVGMGAVFLGFLGAAGSTMGAASITLTVQARQLLSGIVQQQSNLLKAIEAQQHMLKLTVWGIKQLQARVLALERYLKDQQLLGMWGCSGKLICTTNVYWNSSWSNKTYGDIWDNMTWMQWEREISNYTEIIYELLEESQNQQEKNEQDLLALDRWNSLWNWFNITNWLWYIKIFIMIVGGLIGLRIIFAVLSLVNRVRQGYSPLSLQTLIPSPRGPDRPGGIEEEGGEKDRNRSTRLVSGFLALVWDDLRSLCLFIYHRLRDFILIAARAGELLGRSSLKGLRRGWEALKYLGSLVQYWGLELKRSAISLLDTLAIAVGEGTDRILEFVLGICRAIRNIPTRIRQGFETALL

SEQ ID NO: 69 - protein, 851 aa, Artificial Sequence
  Description of Artificial Sequence: Synthetic polypeptide
MRVMGIQRNYPQWWIWSMLGFWMLMICNGMWVTVYYGVPVWKEAKTTLFCASDAKAYEKEVHNVWATHACVPTDPNPQEMVLKNVTENFNMWKNDMVDQMHEDVISLWDQSLKPCVKLTPLCVTLNCTTANATASNSSIIEGMKNCSFNITTELRDKREKKNALFYKLDIVQLDGNSSQYRLINCNTSAITQACPKVSFDPIPIHYCAPAGYAILKCNNKTFNGTGPCNNVSTVQCTHGIKPVVSTQLLLNGSLAEGEIIIRSENITDNGKTIIVHLNESVKIECTRPSNNTRTSIRIGPGQAFYATGQVIGDIREAHCNISESKWNETLQRVSKKLKEYFPQKNITFQPSSGGDLEITTHSFNCGGEFFYCNTSSLFNRTYMATSTDMANSTETNSTRIITIRCRIKQIINMWQEVGRAMYAPPIAGNITCISNITGLLLTRDGGKNNTETFETFRPGGGNMKDNWRSELYKYKVVEVKPLGVAPTNARRRVVEREKRAVGMGAVFLGFLGAAGSTMGAASITLTVQARQLLSGIVQQQSNLLKAIEAQQHMLKLTVWGIKQLQARVLALERYLKDQQLLGMWGCSGKLICTTNVYWNSSWSNKTYGDIWDNMTWMQWEREISNYTELIYELLEESQNQQEKNEQDLLALDRWNSLWNWFNITNWLWYIKIFIMIVGGLIGLRIIFAVLSLVNRVRQGYSPLSLQTLIPSPRGPDRPGGIEEEGGEQDRNRSTRLVSGFLALAWDDLRSLCLFIYHRLRDFILIAARAGELLGRSSLKGLRRGWEALKYLGSLVQYWGLELKRSAISLLDTLAIAVGEGTDRILEFVLGICRAIRNIPTRIRQGFETALL

SEQ ID NO: 70 - protein, 859 aa, Artificial Sequence
  Description of Artificial Sequence: Synthetic polypeptide
MRVMGIQRNYPQWWIWSMLGFWMLMICNGMWVTVYYGVPVWKEAKTTLFCASDAKAYEKEVHNVWATHACVPTDPNPQEMVLKNVTENFNMWKNDMVDQMHEDVISLWDQSLKPCVKLTPLCVTLNCINANATASNSSIIEGMNSSIIEGMKNCSFNITTELRDKREKKNALFYKLDIVQLDGNSSQYRLINCNTSVITQACPKVSFDPIPIHYCAPAGYAILKCNNKTFNGTGPCNNVSTVQCTHGIKPVVSTQLLLNGSLAEGEIIIRSENITDNGKTIIVHLNESVKIECTRPSNNTRTSIRIGPGQAFYATGQVIGDIREAHCNISESKWNETLQRVSEKLKEYFPHKNITFQPSSGGDLEITTHSFNCGGEFFYCNTSSLFNRTYMATSTDMANSTETNSTRIITIRCRIKQIINMWQEVGRAMYAPPIAGNITCISNITGLLLTRDGGKNNTETFETFRPGGGNMKDNWRSELYKYKVVEVKPLGVAPTNARRRVVEREKRAVGMGAVFLGFLGAAGSTMGAASITLTVQARQLLSGIVQQQSNLLKAIEAQQHMLKLTVWGIKQLQARVLALERYLKDQQLLGMWGCSGKLICTTNVYWNSSWSNKTYGDIWDNMTWMQWEREISNYTEIIYELLEESQNQQEKNEQDLLALDRWNSLWNWFNITNWLWYIKIFIMIVGGLIGLRIIFAVLSLVNRVRQGYSPLSLQTLIPSPRGPDRPGGIEEEGGEQDRNRSTRLVSGFLALAWDDLRSLCLFIYHRLRDFILIAARAGELLGRSSLKGLRRGWEALKYLGSLVQYWGLELKRSAISLLDTLAIAVGEGTDRILEFVLGICRAIRNIPTRIRQGFETALL

SEQ ID NO: 71 - protein, 855 aa, Artificial Sequence
  Description of Artificial Sequence: Synthetic polypeptide
MRVMGIQRNYPQWWIWSMLGFWMLMICNGMWVTVYYGVPVWKEAKTTLFCASDAKAYEKEVHNVWATHACVPTDPNPQEMVLKNVTENFNMWKNDMVDQMHEDVISLWDQSLTPCVKLTPLCVTLNCTDATASNATASNATASNATASSSSIIEEMKNCSFNITTELRDKREKKNALFYKLDIVQLDGNSSQYRLINCNTSVITQACPKVSFDPIPIHYCAPAGYAILKCNNKTFNGTGPCNNVSTVQCTHGIKPVVSTQLLLNGSLAEGEIIIRSENITDNGKTIIVHLNESVKIECTRPSNNTRTSIRIGPGQAFYATGQVIGDIREAHCNISESKWNETLQRVSKKLKEYFPHKNITFQPSSGGDPEITTHSFNCGGEFFYCNTSSLFDRTYMANSTETNSTRIITIRCRIKQIINMWQEVGRAMYAPPIAGNITCISNITGLLLTRDGGNSSTETFRPGGGNMKDNWRSELYKYKVVEVKPLGVAPTNARRRVVEREKRAVGMGAVFLGFLGAAGSTMGAASITLTVQARQLLSGIVQQQSNLLKAIEAQQHMLKLTVWGIKQLQARVLALERYLKDQQLLGMWGCSGKLICTTNVYWNSSWSNKTYGDIWDNMTWMQWEREISNYTDIIYELLEESQNQQEKNEQDLLALDRWNSLWNWFNITKWLWYIKIFIMIVGGLIGLRIIFAVLSLVNRVRQGYSPLSLQTLIPSPRGPDRPGGIEEEGGEQDRNRSTRLVSGFLAFAWDDLRSLCLFIYHRLRDFILIAARAGELLGRSSLKGLRRGWEALKYLGGLVQYWGLELKKSAISLLDTLAIAVGEGTDRILEFVLGICRAIRNIPTRTRQGFETALL

SEQ ID NO: 72 - protein, 862 aa, Artificial Sequence
  Description of Artificial Sequence: Synthetic polypeptide
MRVMGRQRNYPQWWIWSMLGLWMLMICNGMWVTVYYGVPVWKEAKTTLFCASDAKAYEKEVHNVWATHACVPTDPNPQEMVLKNVTENFNMWKNDMVDQMHEDVISLWDQSLTPCVKLTPLCVTLNCTDATASNATASNATASNATASNSSIIIEGMKNCSFNITTELRDKREKKNALFYKLDIVQLDGNSSQYRLINCNTSVITQACPKVSFDPIPIHYCAPAGYAILKCNNKTFNGTGPCNNVSTVQCTHGIKPVVSTQLLLNGSLAEGEIIIRSKNITDNGKTIIVHLNESVKIECTRPSNNTRTSIRIGPGQAFYATGQVIGDIREAHCNISESKWNETLQRVSEKLKEYFPNKNITFQPSSGGDLEITTHSFNCGGEFFYCNTSSLFNRTYMFNSTDMANSTETNSTRIITIRCRIKQIINMWQEVGRAMYAPPIAGNITCISNITGLLLTRDGGNSSTETFRPGGGNMKDNWRSELYKYKVVEVKPLGVAPTNARRRVVEREKRAVGMGAVFLGFLGAAGSTMGAASITLTVQARQLLSGIVQQQSNLLKAIEAQQHMLKLTVWGIKQLQARVLALERYLKDQQLLGMWGCSGKLICTTNVYWNSSWSNKTYGDIWDNMTWMQWEGEISNYTEIIYKLLEESQNQQEKNEQDLLALDRWNSLWNWFNITNWLWYIKIFIMIVGGLIGLRIIFAVLSLVNRVRQGYSPLSLQTLIPSPRGPDRPGGIEEEGGEQDRKRSTRLVSGFLALAWDDLRSLCLFIYHRLRDFILIAARAGELLGRSSLKGLRRGWEALKYLGSLVQYWGRELKRSAISLLDTLAIAVGEGTDRILEFALGICRAIRNIPTRIRQGFETALL

SEQ ID NO: 73 - protein, 861 aa, Artificial Sequence
  Description of Artificial Sequence: Synthetic polypeptide
MRVMGIQRNYPQWWIWSMLGLWMLMICNGMWVTVYYGVPVWKEAKTTLFCASDAKAYEKEVHNVWATHACVPTDPNPQEMVLKNVTENFNMWKNDMVDQMHEDVISLWDQSLKPCVKLTPLCVTLNCADATTNATASNATASNATASNSSIIEGMKNCSFNITTELRDKREKKNALFYKLDIVQLDGNSSQYRLINCNTSVITQACPKVSFDPIPIHYCAPAGYAILKCNNKTFNGTGPCNNVSTVQCTHGIKPVVSTQLLLNGSLAEGEIIIRSENITDNGKTIIVHLNESVKIECTRPSNNTRTSIRIGPGQAFYATGQVIGDIREAHCNISESKWNETLQRVSKKLKEYFPLKNITFQPSSGGDLEITTHSFNCGGEFFYCNTSSLFNRTYMANSTDMANSTETNSTRIITIRCRIKQIINMWQEVGRAMYAPPIAGNITCISNITGLLLTRDGGNNTNTETFRPGGGNMKDNWRSELYKYKVVEVKPLGVAPTNARRRVVEREKRAVGMGAVFLGFLGAAGSTMGAASITLTVQARQLLSGIVQQQSNLLKAIEAQQHMLKLTVWGIKQLQARVLALERYLKDQQLLGMWGCSGKLICTTNVYWNSSWSNKTYGDIWDNMTWMQWEREISNYTELIYELLEESQNQQEKNEQDLLALDRWNSLWNWFNITNWLWYIKIFIMIVGGLIGLRIIFAVLSLVNRVRQGYSPLSLQTLIPSPRGPDRPGGIEEEGGEQDRNRSTRLVSGFLALAWDDLRSLCLFIYHRLRDFILIAARAGELLGRSSLKGLRRGWEALKYLGGLVQYWGLELKRSAISLLDTLAIAVGEGTDRILEFVLGICRAIRNIPTRIRQGFETALL

SEQ ID NO: 74 - protein, 856 aa, Artificial Sequence
  Description of Artificial Sequence: Synthetic polypeptide
MRVMGIQRNYPQWWIWSMLGLWMLMICNGMWVTVYYGVPVWKEAKTTLFCASDAKAYEKEVHNVWATHACVPTDPNPQEMVLKNVTENFNMWKNDMADQMHEDVISLWDQSLKPCVKLTPLCVTLNCTDANATASNTNATASNINATASDSSIIEGMKNCSFNITTELRDKREKKYALFYKLDIVQLDGNSSQYRLINCNTSVITQACPKVSFDPIPIHYCAPAGYAILKCNNKTFNGTGPCNNVSTVQCTHGIKPVVSTQLLLNGSLAEGEIIIRSENITNSAKTIIVHLNESVKIECTRPSNNTRTSIRIGPGQAFYATGQVIGDIRKAHCNISESKWNETLQRVSKKLKEYFPHKNITFQPSSGGDLEVTTHSFNCGGEFFYCNTSSLFNRTYMANSTETNSTRTITLHCRIKQIINMWQEVGRAMYAPPIAGNITCISNITGLLLTRDGGNNNTETFRPGGGNMKDNWRSELYKYKVVEVKPLGVAPTNARRRVVEREKRAVGMGAVFLGFLGAAGSTMGAASITLTVQARQLLSGIVQQQSNLLKAIEAQQHMLKLTVWGIKQLQARVLALERYLKDQQLLGMWGCSGKLICTTNVYWNSSWSNKTYGDIWDNMTWMQWEREISNYTEIIYDLLEESQNQQEKNEQDLLALDRWNSLWNWFNITKWLWYIKIFIMIVGGLIGLRIIFAVLSLVNRVRQGYSPLSLQTLIPSPRGPDRPGGIEEEGGEQDRNRSTRLVSGFLALAWDDLRSLCLFIYHRLRDFILIAARAGELLGRSSLKGLRRGWEALKYLGSLVQYWGLELKRSAISLLDTLAIAVGEGTDRILEFVLGICRAIRNIPTRIRQGFETALL

SEQ ID NO: 75 - protein, 851 aa, Artificial Sequence
  Description of Artificial Sequence: Synthetic polypeptide
MRVRGIQRNYPQWWIWSMLGFWMLMICNGMWVTVYYGVPVWKEAKTTLFCASDAKAYEKEVHNVWATHACVPTDPNPQEMVLKNVTENFNMWKNDMVDQMHEDVISLWDQSLKPCVKLTPLCVTLSCTNATNATASNSSILEGMKNCSFNITTELRDKREKKNALFYKLDIVQLDGNSSQYRLINCNTSVITQACPKVSFDPIPIHYCAPAGYAILKCNNKTFNGTGPCNNVSTVQCTHGIKPVVSTQLLLNGSLAEGEIIIRSKNITDNGKTIIVHLNESVKIECTRPSNNTRTSIRIGPGQAFYATGQVIGDIREAHCNISESKWNETLQRVSEKLKEYFPHKNITFQPSSGGDLEITTHSFNCGGEFFYCNTSSLFNRTYMATSTDMANSTETNSTRIITIRCRIKQIINMWQEVGRAMYAPPIAGNITCISNITGLLLTRDGGKNDTDTETFRPEGGNMKDNWRSELYKYKVVEVKPLGVAPTNARRRVVEREKRAVGMGAVFLGFLGAAGSTMGAASITLTVQARQLLSGIVQQQSNLLKAIEAQQHMLKLTVWGIKQLQARVLALERYLKDQQLLGMWGCSGKLICTTNVYWNSSWSNKTYGDIWDNMTWMQWEREISNYTELIYELLEESQNQQEKNEQDLLALDRWNSLWNWFNITNWLWYIKIFIMIVGGLIGLRIIFAVLSLVNRVRQGYSPLSLQTLIPSPRGPDRPGGIEEEGGEQDRNRSTRLVSGFLALAWDDLRSLCLFIYHRLRDFILIAARAGELLGRSSLKGLRRGWEALKYLGSLVQYWGLELKRSAISLLDTLAIAVGEGTDRILEFVLGICRAIRNIPTRIRQGFETALL

SEQ ID NO: 76 - protein, 851 aa, Artificial Sequence
  Description of Artificial Sequence: Synthetic polypeptide
MRVRGIQRNYPQWWIWSMLGFWMLMICNGMWVTVYYGVPVWKEAKTTLFCASDAKAYEKEVHNVWATHACVPTDPNPQEMVLKNVTENFNMWKNDMVDQMHEDVISLWDQSLKPCVKLTPLCVTLNCINATNATASNSSILEGMKNCSFNITTELRDKREKKNALFYKLDIVQLDGNSSQYRLINCNTSVITQACPKVSFDPIPIHYCAPAGYAILKCNNKTFNGTGPCNNVSTVQCTHGIKPVVSTQLLLNGSLAEGEIIIRSKNITDNGKTIIVHLNESVKIECTRPSNNTRTSIRIGPGQAFYATGQVIGNIREAHCNISESKWNETLQRVSEKLKEYFPHKNITFQPSSGGDLEITTHSFNCRGEFFYCNTSSLFNRTYMATSTDMANSTETNSTRIITIRCRIKQIINMWQEVGRAMYAPPIAGNITCISNITGLLLTRDGGENDTDTETFRPEGGNMKDNWRSELYKYKVVEVKPLGVAPTNARRRVVEREKRAVGMGAVFLGFLGAAGSTMGAASITLTVQARQLLSGIVQQQSNLLKAIEAQQHMLKLTVWGIKQLQARVLALERYLKDQQLLGMWGCSGKLICTTNVYWNSSWSNKTYSDIWDNMTWMQWEREISNYTELIYELLEESQNQQEKNEQDLLALDRWNSLWNWFNITNWLWYIKIFIMIVGGLIGLRIIFAVLSLVNRVRQGYSPLSLQTLIPSPRGPDRPGGIEEEGGEQDRNRSTRLVSGFLALVWDDLRSLCLFIYHRLRDFILIAARAGELLGRSSLKGLRRGWEALKYLGSLVQYWGLELKRSAISLLDTLAIAVGEGTDRILEFVLGICRAIRNIPTRIRQGFETALL

SEQ ID NO: 77 - protein, 851 aa, Artificial Sequence
  Description of Artificial Sequence: Synthetic polypeptide
MRVMGRQRNYPQWWIWSMLGLWMLMICNGMWVTVYYGVPVWKEAKTTLFCASDAKAYEKEVHNVWATHACVPTDPNPQEMVLKNVTENFNMWKNDMVDQMHEDVISLWDQSLKPCVKLTPLCVTLNCINATNATASNSSILEGMKNCSFNITTELRDKREKKNALFYKLDIVQLDGNSSQYRLINCNTSVITQACPKVSFDPIPIHYCAPAGYAILKCNNKTFNGTGPCNNVSTVQCTHGIKPVVSTQLLLNGSLAEGEIIIRSKNITDNGKTIIVHLNESVKIECTRPSNNTRTSIRIGPGQAFYATGQVIGDIREAHCNISESKWNETLQRVSKKLKEYFPDKNITFQPSSGGDLEITTHSFNCGGEFFYCNTSSLFNRTYMVNSTDMANSTETNSTRTITISCRIKQIINMWQEVGRAMYAPPIAGNITCISNITGLLLTRDGGKNDTDTETFRPEGGNMKDNWRSELYKYKVVEVKPLGVAPTNARRRVVEREKRAVGMGAVFLGFLGAAGSTMGAASITLTVQARQLLSGIVQQQSNLLKAIEAQQHMLKLTVWGIKQLQARVLALERYLKDQQLLGMWGCSGKLICTTNVYWNSSWSNKTYGDIWDNMTWMQWEREISNYTELIYELLEESQNQQEKNEQDLLALDRWNSLWNWFNITNWLWYIKIFIMIVGGLIGLRIIFAVLSLVNRVRQGYSPLSLQTLIPSPRGPDRPGGIEEEGGEQDRNRSTRLVSGFLALAWDDLRSLCLFIYHRLRDFILIAARAGELLGRSSLKGLRRGWEALKYLGSLVQYWGLELKRSAISLLDTLAIAVGEGTDRILEFVLGICRAIRNIPTRIRQGFETALL

SEQ ID NO: 78 - protein, 856 aa, Artificial Sequence
  Description of Artificial Sequence: Synthetic polypeptide
MRVMGIQRNYPQWWIWSMLGFWMLMICNGMWVTVYYGVPVWKEAKTTLFCASDAKAYEKEVHNVWATHACVPTDPNPQEMVLKNVTENFNMWKNDMADQMHEDVISLWDQSLKPCVKLTPLCVTLNCTDANATASNINATASKSSIIEEMKNCSFNITTELRDKREKKYALFYKLDIVQLDGNSSQYRLINCNTSVITQACPKVSFDPIPIHYCAPAGYAILKCNNKTFNGTGPCNNVSTVQCTHGIKPVVSTQLLLNGSLAEGEIIIRSENITDNSKTIIVHLNESVKIECTRPSNNTRTSIRIGPGQAFYATGQVIGDIREAHCNISESKWNETLQRVSKKLKEYFPDKNITFQPSSGGDPEITTHSFNCGGEFFYCNTSSLFNRTYMANSTETNSTRTITLHCRIKQIINMWQEVGRAMYAPPIAGNITCISNITGLLLTRDGGENTRDGGNNNTETFRPEGGNMKDNWRSELYKYKVVEVKPLGVAPTKARRRVVEREKRAVGMGAVFLGFLGAAGSTMGAASITLTVQARQLLSGIVQQQSNLLKAIEAQQHMLKLTVWGIKQLQARVLALERYLKDQQLLGMWGCSGKLICTTNVYWNSSWSNKTYGDIWDNMTWMQWEREISNYTDIIYELLEESQNQQEKNEQDLLALDRWNSLWNWFNITNWLWYIKIFIMIVGGLIGLRIIFAVLSLVNRVRQGYSPLSLQTLIPSPRGPDRPGGIEEEGGEQDRNRSTRLVSGFLALAWDDLRSLCLFIYHRLRDFILIAARAGELLGRSSLKGLRRGWEALKYLGSLVQYWGLELKRSAISLLDTLAIAVGEGTDRILEFVLGICRAIRNIPTRIRQGFETALL

SEQ ID NO: 79 - protein, 857 aa, Artificial Sequence
  Description of Artificial Sequence: Synthetic polypeptide
MRVTGIQRNYPQWWIWSMLGLWMLMICNGMWVTVYYGVPVWKEAKTTLFCASDAKGYEKEVHNVWATHACVPTDPNPQEMVLKNVTENFNMWKNDMVDQMHEDVISLWDQSLKPCVKLTPLCVTLYCTNATANATASNINVTVSNSSIIEEMKNCSFNITTELRDKREKKYALFYKLDIIQLDGSSSQYRLINCNTSAITQACPKVSFDPIPIHYCAPAGYAILKCNNKTFNGTGPCNNVSTVQCTHGIKPVVSTQLLLNGSLAEGEIIIRSENITNSAKTIIVHLNESVKIECTRPSNNTRTSIGIGPGQAFYATGQVIGDIRKAHCNISESKWNETLQRVSKKLKEYFPDKNITFQPSSGGDPEVTTHSFNCGGEFFYCNTSSLFNRTYMTNSTDMANSTETNRTITIHCRIKQIINMWQEVGRAMYAPPIAGNITCISNITGLLLTRDGGNSSTGTETFRPGGGNMKDNWRSELYKYKVVEVKPLGVAPTNARRRVVEREKRAVGMGAVFLGFLGAAGSTMGAASITLTVQARQLLSGIVQQQSNLLKAIEAQQHMLKLTVWGIKQLQARVLALERYLKDQQLLGMWGCSGKLICTTNVYWNSSWSNKTYVDIWDNMTWMQWEREISNYTDIIYDLLEESQNQQEKNEQDLLALDRWNSLWNWFNITKWLWYIKIFIMIVGGLIGLRIIFAVLSLVNRVRQGYSPLSLQTLIPSPRGPDRPGGIEEEGGEQDRNRSTRLVSGFLALAWDDLRSLCLFLYHRLRDFILIAARAGELLGRSSLKGLRRGWEALKYLGGLVQYWGLELKRSAISLLDTLAIAVGEGTDRILEFVLGICRAIRNIPTRIRQGFETALL

SEQ ID NO: 80 - protein, 848 aa, Artificial Sequence
  Description of Artificial Sequence: Synthetic polypeptide
MRVRGIQRSYPQWWIWSMLGFWMLMICNGMWVTVYYGVPVWKEAKTTLFCASDAKAYEKEVHNVWATHACVPTDPNPQEMVLKNVTENFNMWENDMVDQMHEDVISLWDQSLKPCVKLTPLCVTLNCINATNATASDSSILDGMKNCSFNITTELRDKREKKNALFYKLDIVQLGGNSSQYRLINCNTSVITQACPKVSFDPIPIHYCAPAGYAILKCNNKTFNGTGPCNNVSTVQCTHGIKPVVSTQLLLNGSLAEGEIIIRSKNITDNSKTIIVHLNESVKIECTRPSNNTRTSIRIGPGQAFYATGQVIGNIREAHCNISESKWNETLQRVSEKLKKYFPDKNITFRPSSGGDLEITTHSFNCGGEFFYCNTSSLFNRTYMATSTDMANSTETNIITIHCRIKQIINMWQEVGRAMYAPPIAGNITCISNITGLLLTRDGGNNTEDTETFRPVGGNMKDNWSSELYKYKVVEVKPLGVAPTNARRRVVEREKRAVGMGAVFLGFLGAAGSTMGAASITLTVQARQLLSGIVQQQSNLLKAIEAQQHMLKLTVWGIKQLQARVLALERYLKDQQLLGMWGCSGKLICTTNVYWNSSWSNKTYDDIWDNMTWMQWEREISNYTELIYELLEESQNQQEKNEQDLLALDRWNSLWNWFNITNWLWYIKIFIMIVGGLIGLRIIFAVLSLVNRVRQGYSPLSLQTLIPSPRGPDRPGGIEEEGGEQDRNRSTRLVSGFLALAWDDLRSLCLFIYHRLRDFILIAARAGELLGRSSLKGLRRGWEALKYLGSLVQYWGLELKRSAISLLDTLAIAVGEGTDRILEFVLGICRAIRNIPTRIRQGFETALL

SEQ ID NO: 81 - protein, 846 aa, Artificial Sequence
  Description of Artificial Sequence: Synthetic polypeptide
MRVMGIQRNYPQWWIWSMLGFWMLMICNGMWVTVYYGVPVWKEAKTTLFCASDAKAYEKEVHNVWATHACVPTDPNPQEMVLKNVTENFNMWKNDMVDQMHEDVISLWDQSLKPCVKLTPLCVTLNCTNATASNSSIIEGMKNCSFNITTELRDKREKKNALFYKLDIVQLDGNSSQYRLINCNTSVITQACPKVSFDPIPIHYCAPAGYAILKCNNKTFTGTGPCNNVSTVQCTHGIKPVVSTQLLLNGSLAEGEIIIRSENITNNVKTIIVHLNESVKIECTRPNNKTRTSIRIGPGQAFYATGQVIGDIREAYCNINESKWNETLQRVSKKLKEYFPHKNITFQPSSGGDLEITTHSFNCGGEFFYCNTSSLFNRTYMANSTDMANSTETNSTRTITIHCRIKQIINMWQEVGRAMYAPPIAGNITCISNITGLLLTRDGGKNNTETFRPGGGNMKDNWRSELYKYKVVEVKPLGVAPTNARRRVVEREKRAVGMGAVFLGFLGAAGSTMGAASITLTVQARQLLSGIVQQQSNLLKAIEAQQHMLKLTVWGIKQLQARVLALERYLKDQQLLGMWGCSGKLICTTNVYWNSSWSNKTYGDIWDNMTWMQWEREISNYTEIIYELLEESQNQQEKNEQDLLALDRWNSLWNWFNITNWLWYIKIFIMIVGGLIGLRIIFAVLSLVNRVRQGYSPLSLQTLIPSPRGPDRPGGIEEEGGEQDRNRSTRLVSGFLALVWDDLRSLCLFIYHRLRDFILIAARAGELLGRSSLKGLRRGWEALKYLGSLVQYWGLELKRSAISLLDTLAIAVGEGTDRILEFVLGICRAIRNIPTRIRQGFETALL

SEQ ID NO: 82 - protein, 846 aa, Artificial Sequence
  Description of Artificial Sequence: Synthetic polypeptide
MRVMGIQRNYPQWWIWSMLGFWMLMICNGMWVTVYYGVPVWKEAKTTLFCASDAKAYEKEVHNVWATHACVPTDPNPQEMVLKNVTENFNMWKNDMVDQMHEDVISLWDQSLKPCVKLTPLCVTLNCTNATASNSSIIEGMKNCSFNITTELRDKREKKNALFYKLDIVQLDGNSSQYRLINCNTSVITQACPKVSFDPIPIHYCAPAGYAILKCNNKTFTGTGPCNNVSTVQCTHGIKPVVSTQLLLNGSLAEGEIIIRSENITKNVKTIIVHLNESVKIECTRPNNKTRTSIRIGPGQAFYATGQVIGDIREAYCNINESKWNETLQRVSKKLKEYFPHKNITFQPSSGGDLEITTHSFNCGGEFFYCNTSSLFNRTYMANSTDMANSTETNSTRTITIHCRIKQIINMWQEVGRAMYAPPIAGNITCISNITGLLLTRDGGKNNTETFRPGGGNMKDNWRSELYKYKVVEVKPLGVAPTNARRRVVEREKRAVGMGAVFLGFLGAAGSTMGAASITLTVQARQLLSGIVQQQSNLLKAIEAQQHMLKLTVWGIKQLQARVLALERYLKDQQLLGMWGCSGKLICTTNVYWNSSWSNKTYGDIWDNMTWMQWEREISNYTEIIYELLEESQNQQEKNEQDLLALDRWNSLWNWFNITNWLWYIKIFIMIVGGLIGLRIIFAVLSLVNRVRQGYSPLSLQTLIPSPRGPDRPGGIEEEGGEQDRNRSTRLVSGFLALVWDDLRSLCLFIYHRLRDFILIAARAGELLGRSSLKGLRRGWEALKYLGSLVQYWGLELKRSAISLLDTLAIAVGEGTDRILEFVLGICRAIRNIPTRIRQGFETALL

SEQ ID NO: 83 - protein, 846 aa, Artificial Sequence
  Description of Artificial Sequence: Synthetic polypeptide
MRVMGIQRNYPQWWIWSMLGFWMLMICNGMWVTVYYGVPVWKEAKTTLFCASDAKAYEKEVHNVWATHACVPTDPNPQEMVLKNVTENFNMWKNDMVDQMHEDVISLWDQSLKPCVKLTPLCVTLNCTNATTSNSSIIEGMKNCSFNITTELRDKREKKNALFYKLDIVQLDGNSSQYRLINCNTSVITQACPKVSFDPIPIHYCAPAGYAILKCNNKTFTGTGPCNNVSTVQCTHGIKPVVSTQLLLNGSLAEGEIIIRSENITNNVKTIIVHLNESVKIECTRPNNKTRTSIRIGPGQAFYATGQVIGDIREAYCNISESKWNETLQRVSKKLKEYFPHKNITFQPSSGGDLEITTHSFNCGGEFFYCNTSSLFNRTYMANSTDMANSTETNNTRTITIHCRIKQIINMWQEVGRAMYAPPIAGNITCISNITGLLLTRDGGKNNTETFRPGGGNMKDNWRSELYKYKVVEVKPLGVAPTNARRRVVEREKRAVGMGAVFLGFLGAAGSTMGAASITLTVQARQLLSGIVQQQSNLLKAIEAQQHMLKLTVWGIKQLQARVLALERYLKDQQLLGMWGCSGKLICTTNVYWNSSWSNKTYGDIWDNMTWMQWEREISNYTEIIYELLEESQNQQEKNEQDLLALDRWNSLWNWFNITNWLWYIKIFIMIVGGLIGLRIIFAVLSLVNRVRQGYSPLSLQTLIPSPRGPDRPGGIEEEGGEQDRNRSTRLVSGFLALVWDDLRSLCLFIYHRLRDFILIAARAGELLGRSSLKGLRRGWEALKYLGSLVQYWGLELKRSAISLLDTLAIAVGEGTDRILEFVLGICRAIRNIPTRIRQGFETALL

SEQ ID NO: 84 - protein, 846 aa, Artificial Sequence
  Description of Artificial Sequence: Synthetic polypeptide
MRVMGIQRNYPQWWIWSMLGFWMLMICNGMWVTVYYGVPVWKEAKTTLFCASDAKAYEKEVHNVWATHACVPTDPNPQEMVLKNVTENFNMWKNDMVDQMHEDVISLWDQSLKPCVKLTPLCVTLNCTNATTSNSSIIEGMKNCSFNITTELRDKREKKNALFYKLDIVQLDGNSSQYRLINCNTSVITQACPKVSFDPIPIHYCAPAGYAILKCNNKTFTGTGPCNNVSTVQCTHGIKPVVSTQLLLNGSLAEGEIIIRSENITNNVKTIIVHLNESVKIECTRPNNKTRTSIRIGPGQAFYATGQVIRNIREAYCNINESKWNETLQRVSKKLKEYFPHKNITFQPSSGGDLEITTHSFNCGGEFFYCNTSSLFNRTYMANSTDMANSTETNSTRTIKIHCRIKQIINMWQEVGRAMYAPPIAGNITCISNITGLLLTRDGGKNNTETFRPGGGNMKDNWRSELYKYKVVEVKPLGVAPTNARRRVVEREKRAVGMGAVFLGFLGAAGSTMGAASITLTVQARQLLSGIVQQQSNLLKAIEAQQHMLKLTVWGIKQLQARVLALERYLKDQQLLGMWGCSGKLICTTNVYWNSSWSNKTYGDIWDNMTWMQWEREISNYTEIIYELLEESQNQQEKNEQDLLALDRWNSLWNWFNITNWLWYIKIFIMIVGGLIGLRIIFAVLSLVNRVRQGYSPLSLQTLIPSPRGPDRPGGIEEEGGEQDRNRSTRLVSGFLALVWDDLRSLCLFIYHRLRDFILIAARAGELLGRSSLKGLRRGWEALKYLGSLVQYWGLELKRSAISLLDTLAIAVGEGTDRILEFVLGICRAIRNIPTRIRQGFETALL

SEQ ID NO: 85 - protein, 846 aa, Artificial Sequence
  Description of Artificial Sequence: Synthetic polypeptide
MRVMGIQRNYPQWWIWSMLGFWMLMICNGMWVTVYYGVPVWKEAKTTLFCASDAKAYEKEVHNVWATHACVPTDPNPQEMVLKNVTENFNMWKNDMVDQMHEDVISLWDQSLKPCVKLTPLCVTLNCTNATTSNSSIIEGMKNCSFNITTELRDKREKKNALFYKLDIVQLDGNSSQYRLINCNTSVITQACPKVSFDPIPIHYCAPAGYAILKCNNKTFTGTGPCNNVSTVQCTHGIKPVVSTQLLLNGSLAEGEIIIRSENITNNAKTIIVHLNESVKIECTRPNNKTRTSIRIGPGQAFYATGQVIGDIRKAYCNINESKWNETLQRVSKKLKEYFPHKNITFQPSSGGDLEITTHSFNCGGEFFYCNTSSLFNRTYMANSTDMANSTETNSTRTITIRCRIKQIINMWQEVGRAMYAPPIAGNITCISNITGLLLTRDGGKNNTETFRPGGGNMKDNWRSELYKYKVVEVKPLGVAPTNARRRVVEREKRAVGMGAVFLGFLGAAGSTMGAASITLTVQARQLLSGIVQQQSNLLKAIEAQQHMLKLTVWGIKQLQARVLALERYLKDQQLLGMWGCSGKLICTTNVYWNSSWSNKTYGDIWDNMTWMQWEREISNYTEIIYELLEESQNQQEKNEQDLLALDRWNSLWNWFNITNWLWYIKIFIMIVGGLIGLRIIFAVLSLVNRVRQGYSPLSLQTLIPSPRGPDRPGGIEEEGGEQDRNRSTRLVSGFLALAWDDLRSLCLFIYHRLRDFILIAARAGELLGRSSLKGLRRGWEALKYLGSLVQYWGLELKRSAISLLDTLAIAVGEGTDRILEFVLGICRAIRNIPTRIRQGFETALL

SEQ ID NO: 86 - protein, 851 aa, Artificial Sequence
  Description of Artificial Sequence: Synthetic polypeptide
MRVMGIQRNYPQWWIWSMLGFWMLMICNGMWVTVYYGVPVWKEAKTTLFCASDAKAYEKEVHNVWATHACVPTDPNPQEMVLKNVTENFNMWKNDMVDQMHEDVISLWDQSLKPCVKLTPLCVTLNCTNATASNATASNSSIIEGMKNCSFNITTELRDKREKKNALFYKLDIVQLDGNSSQYRLINCNTSVITQACPKVSFDPIPIHYCAPAGYAILKCNNKTFTGTGPCNNVSTVQCTHGIKPVVSTQLLLNGSLAEGEIIIRSENITNNVKTIIVHLNESVKIECTRPNNKTRKSIRIGPGQAFYATGQVIGDIREAYCNINESKWNETLQRVSKKLKEYFPHKNITFQPSSGGDLEITTHSFNCGGEFFYCNTSSLFNRTYMANSTDMANSTETNSTRTITIRCRIKQIINMWQEVGRAMYAPPIAGNITCISNITGLLLTRDGGKNNTETFRPGGGNMKDNWRSELYKYKVVEVKPLGVAPTNARRRVVEREKRAVGMGAVFLGFLGAAGSTMGAASITLTVQARQLLSGIVQQQSNLLKAIEAQQHMLKLTVWGIKQLQARVLALERYLKDQQLLGMWGCSGKLICTTNVYWNSSWSNKTYGDIWDNMTWMQWEREISNYTEIIYELLEESQNQQEKNEQDLLALDRWNSLWNWFNITNWLWYIKIFIMIVGGLIGLRIIFAVLSLVNRVRQGYSPLSLQTLIPSPRGPDRPGGIEEEGGEQDRNRSTRLVSGFLALVWDDLRSLCLFIYHRLRDFILIAARAGELLGRSSLKGLRRGWEALKYLGSLVQYWGLELKRSAISLLDTLAIAVGEGTDRILEFVLGICRAIRNIPTRIRQGFETALL

SEQ ID NO: 87 - protein, 857 aa, Artificial Sequence
  Description of Artificial Sequence: Synthetic polypeptide
MRVMGIQRNYPQWWIWSMLGFWMLMICNGMWVTVYYGVPVWKEAKTTLFCASDAKAYEKEVHNVWATHACVPTDPNPQEMVLKNVTENFNMWKNDMVDQMHEDVISLWDQSLKPCVKLTPLCVTLNCTNATTNATASNSSIIEGMKNCSFNITTELRDKREKKNALFYKLDIVQLDGNSSQYRLINCNTSVITQACPKVSFDPIPIHYCAPAGYAILKCNNKTFTGTGPCNNVSTVQCTHGIKPVVSTQLLLNGSLAEGEIIIRSENITNNAKTIIVHLNESVKIECTRPNNKTRTSIRIGPGQAFYATGQVIGDIREAYCNISESKWNETLQRVSKKLKEYFPHKNITFQPSSGGDLEITTHSFNCGGEFFYCNTSSLFNRTYMANSTDMANSTETNSTRIITIHCRIKQIINMWQEVGRAMYAPPIAGNITCISNITGLLLTRDGGKNTRDGGKNNTETFRPGGGNMKDNWRSELYKYKVVEVKPLGVAPTNARRRVVEREKRAVGMGAVFLGFLGAAGSTMGAASITLTVQARQLLSGIVQQQSNLLKAIEAQQHMLKLTVWGIKQLQARVLALERYLKDQQLLGMWGCSGKLICTTNVYWNSSWSNKTYGDIWDNMTWMQWEREISNYTEIIYELLEESQNQQEKNEQDLLALDRWNSLWNWFNITNWLWYIKIFIMIVGGLIGLRIIFAVLSLVNRVRQGYSPLSLQTLIPSPRGPDRPGGIEEEGGEQDRNRSTRLVSGFLALAWDDLRSLCLFIYHRLRDFILIAARAGELLGRSSLKGLRRGWEALKYLGSLVQYWGLELKRSAISLLDTLAIAVGEGTDRILEFVLGICRAIRNIPTRIRQGFETALL

SEQ ID NO: 88 - protein, 851 aa, Artificial Sequence
  Description of Artificial Sequence: Synthetic polypeptide
MRVMGIQRNYPQWWIWSMLGFWMLMICNGMWVTVYYGVPVWKEAKTTLFCASDAKAYEKEVHNVWATHACVPTDPNPQEMVLKNVTENFNMWKNDMVDQMHEDVISLWDQSLKPCVKLTPLCVTLNCTNATNATASNSSIIEGMKNCSFNITTELRDKREKKNALFYKLDIVQLDGNSSQYRLINCNTSVITQACPKVSFDPIPIHYCAPAGYAILKCNNKTFTGTGSCNNVSTVQCTHGIKPVVSTQLLLNGSLAEGEIIIRSENITDNGKTIIVHLNESVKIECTRPNNKTRTSIRIGPGQAFYATGQVIGDIKEAYCNISESKWNETLQRVSKKLKEYFPHKNITFQPSSGGDLEITTHSFNCGGEFFYCNTSSLFNRTYMANSTDMANSTETNSTRNITIHCRIKQIINMWQEVGRAMYAPPIAGNITCISNITGLLLTRDGGKNNTDTETFRPGGGNMKDNWRSELYKYKVVEVKPLGVAPTNARRRVVEREKRAVGMGAVFLGFLGAAGSTMGAASITLTVQARQLLSGIVQQQSNLLKAIEAQQHMLKLTVWGIKQLQARVLALERYLKDQQLLGMWGCSGKLICTTNVYWNSSWSNKTYGDIWDNMTWMQWEREISNYTEIIYELLEESQNQQEKNEQDLLALDRWNSLWNWFNITNWLWYIKIFIMIVGGLIGLRIIFAVLSLVNRVRQGYSPLSLQTLIPSPRGPDRPGGIEEEGGEQDRNRSTRLVSGFLALVWDDLRSLCLFIYHRLRDFILIAARAGELLGRSSLKGLRRGWEALKYLGSLVQYWGLELKRSAISLLDTLAIAIGEGTDRILEFVLGICRAIRNIPTRIRQGFETALL

SEQ ID NO: 89 - protein, 850 aa, Artificial Sequence
  Description of Artificial Sequence: Synthetic polypeptide
MRVMGIQRNYPQWWIWSMLGFWMLMICNGMWVTVYYGVPVWKEAKTTLFCASDAKAYEKEVHNVWATHACVPTDPNPQEMVLKNVTENFNMWKNDMVDQMHEDVISLWDQSLKPCVKLTPLCVTLNCTNATTNATASNSSIIEEMKNCSFNITTELRDKREKKNALFYKLDIVQLDGNSSQYRLINCNTSVITQACPKVSFDPIPIHYCAPAGYAILKCNNKTFTGTGPCNNVSTVQCTHGIKPVVSTQLLLNGSLAEGEIIIRSENITNTAKTIIVHLNESVKIECTRPNNKTRTSIRIGPGQAFYATGQVIGDIREAYCNISESKWNETLQRVSKKLKEYFPHKNITFQPSSGGDLEITTHSFNCGGEFFYCNTSSLFNRTYMANSTDMANSTETNSTRTITIRCRIKQIINMWQEVGRAMYAPPIAGNITCISNITGLLLTRDGGENNTETFRPGGGNMKDNWRSELYKYKVVEVKPLGVAPTNARRRVVEREKRAVGMGAVFLGFLGAAGSTMGAASITLTVQARQLLSGIVQQQSNLLKAIEAQQHMLKLTVWGIKQLQARVLALERYLKDQQLLGMWGCSGKLICTTNVYWNSSWSNKTYGDIWDNMTWMQWEREISNYTEIIYELLEESQNQQEKNEQDLLALDRWNSLWNWFNITNWLWYIKIFIMIVGGLIGLRIIFAVLSLVNRVRQGYSPLSLQTLIPSPRGPDRPGGIEEEGGEQDRNRSTRLVSGFLALVWDDLRSLCLFIYHRLRDFILIAARAGELLGRSSLKGLRRGWEALKYLGSLVQYWGLELKRSAISLLDTLAIAVGEGTDRILEFVLGICRAIRNIPTRIRQGFETALL

SEQ ID NO: 90 - protein, 852 aa, Artificial Sequence
  Description of Artificial Sequence: Synthetic polypeptide
MRVMGIQRNYPQWWIWSMLGFWMLMICNGMWVTVYYGVPVWKEAKTTLFCASDAKAYEKEVHNVWATHACVPTDPNPQEMVLKNVTENFNMWKNDMVDQMHEDVISLWDQSLKPCVKLTPLCVTLNCTNATANATASNSSIIEGMKNCSFNITTELRDKREKKNALFYKLDIVQLDGNSSQYRLINCNTSVITQACPKVSFDPIPIHYCAPAGYAILKCNNKTFNGTGPCNNVSTVQCTHGIKPVVSTQLLLNGSLAEGEIIIRSENITNNVKTIIVHLNESVKIECTRPNNKTRTSIRIGPGQAFYATGQVIGDIREAYCNISESKWNETLQRVSKKLKEYFPHKNITFQPSSGGDLEITTHSFNCGGEFFYCNTSSLFNRTYMANSTDMANSTETNSTRTIKIHCRIKQIINMWQEVGRAMYAPPIAGNITCISNITGLLLTRDGGKNNTDTETFRPGGGNMKDNWRSELYKYKVVEVKPLGVAPTNARRRVVEREKRAVGMGAVFLGFLGAAGSTMGAASITLTVQARQLLSGIVQQQSNLLKAIEAQQHMLKLTVWGIKQLQARVLALERYLKDQQLLGMWGCSGKLICTTNVYWNSSWSNKTYGDIWDNMTWMQWEREISNYTEIIYELLEESQNQQEKNEQDLLALDRWNSLWNWLNITNWLWYIKIFIMIVGGLIGLRIIFAVLSLVNRVRQGYSPLSLQTLIPSPRGPDRPGGIEEEGGEQDRNRSTRLVSGFLALVWDDLRSLCLFIYHRLRDFILIAARAGELLGRSSLKGLRRGWEALKYLGSLVQYWGLELKRSAISLLDTLAIAVGEGTDRILEFVLGICRAIRNIPTRIRQGFETALL

SEQ ID NO: 91 - protein, 846 aa, Artificial Sequence
  Description of Artificial Sequence: Synthetic polypeptide
MRVMGIQRNYPQWWIWSMLGFWMLMICNGMWVTVYYGVPVWKEAKTTLFCASDAKAYEKEVHNVWATHACVPTDPNPQEMVLKNVTENFNMWKNDMVDQMHEDVISLWDQSLKPCVKMTPLCVTLNCTNATAINSSIIEGMKNCSFNITTELRDKREKKNALFYKLDIVQLDGNSSQYRLINCNTSVITQACPKVSFDPIPIHYCAPAGYAILKCNNKTFTGTGPCNNVSTVQCTHGIKPVVSTQLLLNGSLAEGEIIIRSENITNNDKTIIVHLNESVKIECTRPNNKTRTSIRIGPGQAFYATGQVIGDIREAYCNISESKWNETLQRVSKKLKEYFPHKNITFQPSSGGDLEITTHSFNCGGEFFYCNTSSLFNRTYMANSTDMANSTETNNTRPITIHCRIKQIINMWQEVGRAMYAPPIAGNITCISNITGLLLTRDGGKNNTETFRPGGGNMKDNWRSELYKYKVVEVKPLGIAPTNARRRVVEREKRAVGMGAVFLGFLGAAGSTMGAASITLTVQARQLLSGIVQQQSNLLKAIEAQQHMLKLTVWGIKQLQARVLALERYLKDQQLLGMWGCSGKLICTTNVYWNSSWSNKTYGDIWDNMTWMQWEREISNYTEIIYELLEESQNQQEKNEQDLLALDRWNSLWNWFNITNWLWYIKIFIMIVGGLIGLRIIFAVLSLVNRVRQGYSPLSLQTLIPSPRGPDRPGGIEEEGGEQDRNRSTRLVSGFLALVWDDLRSLCLFIYHRLRDFILIAARAGELLGRSSLKGLRRGWEALKYLGSLVQYWGLELKRSAISLLDTLAIAVGEGTDRILEFVLGICRAIRNIPTRIRQGFETALL

SEQ ID NO: 92 - protein, 846 aa, Artificial Sequence
  Description of Artificial Sequence: Synthetic polypeptide
MRVMGIQRNYPQWWIWSMLGFWMLMICNGMWVTVYYGVPVWKEAKTTLFCASDAKAYEKEVHNVWATHACVPTDPNPQEMVLKNVTENFNMWKNDMVDQMHEDVISLWDQSLKPCVKLTPLCVTLNCTNATNATASNSSILEGMKNCSFNITTELRDKREKKNALFYKLDIVQLDGNSSQYRLINCNTSVITQACPKVSFDPIPIHYCAPAGYAILKCNNKTFNGTGPCNNVSTVQCTHGIKPVVSTQLLLNGSLAEGEIIIRSENITDNGKTIIVHLNESVKIECTRPSNNTRTSIRIGPGQAFYATGQVIGDIREAHCNISESKWNETLQRVSKKLKEYFPHKNITFQPSSGGDLEITTHSFNCGGEFFYCNTSSLFNRTYMANSTETNSTRTITLHCRIKQIINMWQEVGRAMYAPPIAGNITCISNITGLLLTRDGGKNNTETFETFRPGGGNMKDNWRSELYKYKVVEVKPLGVAPTNARRRVVEREKRAVGMGAVFLGFLGAAGSTMGAASITLTVQARQLLSGIVQQQSNLLKAIEAQQHMLKLTVWGIKQLQARVLALERYLKDQQLLGMWGCSGKLICTTNVYWNSSWSNKTYGDIWDNMTWMQWEREISNYTEIIYELLEESQNQQEKNEQDLLALDRWNSLWNWFNITNWLWYIKIFIMIVGGLIGLRIIFAVLSLVNRVRQGYSPLSLQTLIPSPRGPDRPGGIEEEGGEQDRNRSTRLVSGFLALAWDDLRSLCLFIYHRLRDFILIAARAGELLGRSSLKGLRRGWEALKYLGSLVQYWGLELKRSAISLLDTLAIAVGEGTDRILEFVLGICRAIRNIPTRIRQGFETALL

SEQ ID NO: 93 - protein, 848 aa, Artificial Sequence
  Description of Artificial Sequence: Synthetic polypeptide
MRVMGIQRNYPQWWIWSMLGFWMLMICNGMWVTVYYGVPVWKEAKTTLFCASDAKAYEKEVHNVWATHACVPTDPNPQEMVLKNVTENFNMWKNDMVDQMHEDVISLWDQSLKPCVKLTPLCVTLNCTDATASNATAINSSIIEGMKNCSFNITTELRDKREKKNALFYKLDIVQLDGNSSQYRLINCNTSVITQACPKVSFDPIPIHYCAPAGYAILKCNNKTFNGTGPCNNVSTVQCTHGIKPVVSTQLLLNGSLAEGEIIIRSENITNNAKTIIVHLNESVKIECTRPSNNTRTSIRIGPGQAFYATGQVIGDIREAHCNISESKWNETLQRVSKKLKEYFPHKNITFQPSSGGDLEITTHSFNCGGEFFYCNTSSLFNRTYMANSTETNSTRIITIRCRIKQIINMWQEVGRAMYAPPIAGNITCISNITGLLLTRDGGKNNTETFETFRPEGGNMKDNWRSELYKYKVVEVKPLGVAPTNARRRVVEREKRAVGMGAVFLGFLGAAGSTMGAASITLTVQARQLLSGIVQQQSNLLKAIEAQQHMLKLTVWGIKQLQARVLALERYLKDQQLLGMWGCSGKLICTTNVYWNSSWSNKTYGDIWDNMTWMQWEREISNYTEIIYELLEESQNQQEKNEQDLLALDRWNSLWNWFNITNWLWYIKIFIMIVGGLIGLRIIFAVLSLVNRVRQGYSPLSLQTLIPSPRGPDRPGGIEEEGGEQDRNRSTRLVSGFLALAWDDLRSLCLFIYHRLRDFILIAARAGELLGRSSLKGLRRGWEALKYLGSLVQYWGLELKRSAISLLDTLAIAVGEGTDRILEFVLGICRAIRNIPTRIRQGFETALL

SEQ ID NO: 94 - protein, 850 aa, Artificial Sequence
  Description of Artificial Sequence: Synthetic polypeptide
MRVMGIQRNYPQWWIWSMLGFWMLMICNGMWVTVYYGVPVWKEAKTTLFCASDAKAYEKEVHNVWATHACVPTDPNPQEMVLKNVTENFNMWKNDMVDQMHEDVISLWDQSLKPCVKLTPLCVTLNCTDATASNATASNATASNSSIIEGMKNCSFNITTELRDKREKKNALFYKLDIVQLDGNSSQYRLINCNTSVITQACPKVSFDPIPIHYCAPAGYAILKCNNKTFNGTGPCNNVSTVQCTHGIKPVVSTQLLLNGSLAEGEIIIRSENITDNGKTIIVHLNESVKIECTRPSNNTRTSIRIGPGQAFYATGQVIGDIREAHCNISESKWNETLQRVSKKLKEYFPHKNITFQPSSGGDLEITTHSFNCGGEFFYCNTSSLFNRTYMANSTETNSTRIITIRCRIKQIINMWQEVGRAMYAPPIAGNITCISNITGLLLTRDGGNNNTETFRPGGGNMKDNWRSELYKYKVVEVKPLGVAPTNARRRVVEREKRAVGMGAVFLGFLGAAGSTMGAASITLTVQARQLLSGIVQQQSNLLKAIGAQQHMLKLTVWGIKQLQARVLALERYLKDQQLLGMWGCSGKLICTTNVYWNSSWSNKTYGDIWDNMTWMQWEREISNYTEMIYELLEESQNQQEKNEQDLLALDRWNSLWNWFNITNWLWYIKIFIMIVGGLIGLRIIFAVLSLVNRVRQGYSPLSLQTLIPSPRGPDRPGGIEEEGGEQDRKRSTRLVSGFLALVWDDLRSLCLFIYHRLRDFILIAARAGELLGRSSLKGLRRGWEALKYLGSLVQYWGLELKRSAISLLDTLAIAVGEGTDRILEFALGICRAIRNIPTRIRQGFETALL

SEQ ID NO: 95 - protein, 859 aa, Artificial Sequence
  Description of Artificial Sequence: Synthetic polypeptide
MRVMGIQRNYPQWWIWSMLGFWMLMICNGMWVTVYYGVPVWKEAKTTLFCASDAKAYEKEVHNVWATHACVPTDPNPQEMVLKNVTENFNMWKNDMVDQMHEDVISLWDQSLKPCVKLTPLCVTLNCTNANATASNSSIIEGMNSSIIEGMKNCSFNITTELRDKREKKNALFYKLDIVQLDGNSSQYRLINCNTSVITQACPKVSFDPIPIHYCAPAGYAILKCNNKTFNGTGPCNNVSTVQCTHGIKPVVSTQLLLNGSLAEGEIIIRSENITDNGKTIIVHLNESVKIECTRPSNNTRTSIRIGPGQAFYATGQVIGDIREAHCNISESKWNETLQRVSEKLKEYFPHKNITFQPSSGGDLEITTHSFNCGGEFFYCNTSSLFNRTYMATSTDMANSTETNSTRIITIRCRIKQIINMWQEVGRAMYAPPIAGNITCISNITGLLLTRDGGKNNTETFETFRPGGGNMKDNWRSELYKYKVVEVKPLGVAPTNARRRVVEREKRAVGMGAVFLGFLGAAGSTMGAASITLTVQARQLLSGIVQQQSNLLKAIEAQQHMLKLTVWGIKQLQARVLALERYLKDQQLLGMWGCSGKLICTTNVYWNSSWSNKTYGDIWDNMTWMQWEREISNYTEIIYELLEESQNQQEKNEQDLLALDRWNSLWNWFNITNWLWYIKIFIMIVGGLIGLRIIFAVLSLVNRVRQGYSPLSLQTLIPSPRGPDRPGGIEEEGGEQDRNRSTRLVSGFLALAWDDLRSLCLFIYHRLRDFILIAARAGELLGRSSLKGLRRGWEALKYLGSLVQYWGLELKRSAISLLDTLAIAVGEGTDRILEFVLGICRAIRNIPTRIRQGFETALL

SEQ ID NO: 96 - protein, 859 aa, Artificial Sequence
  Description of Artificial Sequence: Synthetic polypeptide
MRVMGIQRNYPQWWIWSMLGLWMLMICNGMWVTVYYGVPVWKEAKTTLFCASDAKAYEKEVHNVWATHACVPTDPNPQEMVLKNVTENFNMWKNDMADQMHEDVISLWDQSLKPCVKLTPLCVTLNCTDATASNATASNATASNSSINSSIIEEMKNCSFNITTELRDKREKKNALFYKLDIVQLDGNSSQYRLINCNTSAITQACPKVSFDPIPIHYCAPAGYAILKCNNKTFNGTGPCNNVSTVQCTHGIKPVVSTQLLLNGSLAEGEIIIRSENITDNGKTIIVHLNESVKIECTRPSNNTRTSIRIGPGQAFYATGQVIGDIREAHCNISESKWNETLQRVSKKLKEYFPHKNITFQPSSGGDLEVTTHSFNCGGEFFYCNTSSLFNRTDMANSTETNSTRIITIRCRIKQIVNMWQEVGRAMYAPPIAGNITCISNITGLLLTRDGGENNGGKNNTETFRPGGGNMKDNWRSELYKYKVVEVKPLGVAPTNARRRVVEREKRAVGMGAVFLGFLGAAGSTMGAASITLTVQARQLLSGIVQQQSNLLKAIEAQQHMLKLTVWGIKQLQARVLALERYLKDQQLLGMWGCSGKLICTTNVYWNSSWSNKTYGDIWDNMTWMQWEREISNYTEIIYELLEESQNQQEKNEQDLLALDRWNSLWNWFNITKWLWYIKIFIMIVGGLIGLRIIFAVLSLVNRVRQGYSPLSLQTLIPSPRGPDRPGGIEEEGGEQDRNRSTRLVSGFLALAWDDLRSLCLFIYHRLRDFILIAARAGELLGRSSLKGLRRGWEALKYLGGLVQYWGLELKRSAISLLDTLAIAVGEGTDRILEFVLGICRAIRNIPTRIRQGFETALL

SEQ ID NO: 97 - protein, 863 aa, Artificial Sequence
  Description of Artificial Sequence: Synthetic polypeptide
MRVMGIQRNYPQWWIWSMLGLWMLMICNGMWVTVYYGVPVWKEAKTTLFCASDAKAYEKEVHNVWATHACVPTDPNPQEMVLKNVTENFNMWKNDMVDQMHEDVISLWDQSLKPCVKLTPLCVTLNCTDATASNATASNATASNATASNSSIIIEGMKNCSFNITTELRDKREKKNALFYKLDIVQLDGNSSQYRLINCNTSVITQACPKVSFDPIPIHYCAPAGYAILKCNNKTFNGTGPCNNVSTVQCTHGIKPVVSTQLLLNGSLAEGEIIIRSKNITDNGKTIIVHLNESVKIECTRPSNNTRTSIRIGPGQAFYATGQVIGDIREAHCNISESKWNETLQRVSKKLKEYFPQKNITFQPSSGGDLEITTHSFNCGGEFFYCNTSSLFNRTYMANSTDMANSTETNRTITIRCRIKQIINMWQEVGRAMYAPPIAGNITCISNITGLLLTRDGGKNNTETFETFRPGGGNMKDNWRSELYKYKVVEVKPLGVAPTNARRRVVEREKRAVGMGAVFLGFLGAAGSTMGAASITLTVQARQLLSGIVQQQSNLLKAIEAQQHMLKLTVWGIKQLQARVLALERYLKDQQLLGMWGCSGKLICTTNVYWNSSWSNKTYGDIWDNMTWMQWEREISNYTEMIYELLEESQNQQEKNEQDLLALDRWNSLWNWFNITKWLWYIKIFIMIVGGLICLRIIFAVLSLVNRVRQGYSPLSLQTLIPSPRGPDRPGGIEEEGGEQDRKRSTRLVSGFLALVWDDLRSLCLFIYHRLRDFILIAARAGELLGRSSLKGLRRGWEALKYLGSLVQYWGLELKRSAISLLDTLAIAVGEGTDRILEFALGICRAIRNIPTRIRQGFETALL

SEQ ID NO: 98 - protein, 848 aa, Artificial Sequence
  Description of Artificial Sequence: Synthetic polypeptide
MRVTGIQRNYPQWWIWSMLGLWMLMICNGMWVTVYYGVPVWKEAKTTLFCASDAKAYEKEVHNVWATHACVPTDPNPQEMVLKNVTENFNMWKNDMADQMHEDVISLWDQSLKPCVKLTPLCVTLNCIDANATASNATASNSSIIEGMKNCSFNITTELRDKIEKKNALFYKLDIVQLDGNSSQYRLINCNTSVITQACPKVSFDPIPIHYCAPAGYAILKCNNKTFNGTGPCNNVSTVQCTHGIKPVVSTQLLLNGSLAEGEIIIRSENITNSAKTIIVHLNESVKIECTRPSNNTRTSIRIGPGQAFYATGQVIGDIRKAHCNISESKWNETLQRVSKKLKEYFPHKNITFQPSSGGDLEITTHSFNCGGEFFYCNTSSLFNRTYMANSTETNSTRTITLHCRIKQIINMWQEVGRAMYAPPIAGNITCISNITGLLLTRDGGNNNTTETFRPGGGNMKDNWRSELYKYKVVEIKPLGVAPTNARRRVVEREKRAVGMGAVFLGFLGAAGSTMGAASITLTVQARQLLSGIVQQQSNLLKAIEAQQHMLKLTVWGIKQLQARVLALERYLKDQQLLGMWGCSGKLICTTNVYWNSSWSNKTYGDIWDNMTWMQWEREISDYTEIIYELLEESQNQQEKNEQDLLALDRWNSLWNWFNITNWLWYIKIFIMIVGGLIGLRIIFAVLSLVNRVRQGYSPLSLQTLTPSPRGPDRPGGIEEEGGEQDRNRSTRLVSGFLALAWDDLRSLCLFIYHRLRDFILIAARAGELLGRSSLKGLRRGWEALKYLGGLVQYWGLELKRSAISLLDTLAIAVGEGTDRILEFVLGICRAIRNIPTRIRQGFETALL

SEQ ID NO: 99 - protein, 852 aa, Artificial Sequence
  Description of Artificial Sequence: Synthetic polypeptide
MRVMGIQRNYPQWWIWSMLGFWMLMICNGMWVTVYYGVPVWKEAKTTLFCASDAKAYEKEVHNVWATHACVPTDPNPQEMVLKNVTENFNMWKNDMVDQMHEDVISLWDQSLKPCVKLTPLCVTLDCINATNATASNSSILEGMKNCSFNITTELRDKREKKNALFYKLDIVQLGGNSSQYRLINCNTSVITQACPKVSFDPIPIHYCAPAGYAILKCNNKTFNGTGPCNNVSTVQCTHGIKPVVSTQLLLNGSLAEGEIIIRSKNITDNGKTIIVHLNESVKIECTRPSNNTRTSIRIGPGQAFYATGQVIGDIREAHCNISESKWNETLQRVSKKLKEYFPDKNITFQPSSGGDLEITTHSFNCGGEFFYCNTSSLFNRTYMVNSTDMANSTETNSTRTITIRCRIKQIINMWQEVGRAMYAPPIAGNITCISNITGLLLTRDGGENNTETFETFRPGGGNMKDNWRSELYKYKVVEVKPLGVAPTNARRRVVEREKRAVGMGAVFLGFLGAAGSTMGAASITLTVQARQLLSGIVQQQSNLLKAIEAQQHMLKLTVWGIKQLQARVLALERYLKDQQLLGMWGCSGKLICTTNVYWNSSWSNKTYGDIWDNMTWMQWEREISNYTELIYELLEESQNQQEKNEQDLLALDRWNSLWNWFNITNWLWYIKIFIMIVGGLIGLRIIFAVLSLVNRVRQGYSPLSLQTLIPSPRGPDRPGGIEEEGGEQDRNRSTRLVSGFLALAWDDLRSLCLFIYHRLRDFILIAARAGELLGRSSLKGLRRGWEALKYLGSLVQYWGLELKRSAISLLDTLAIAVGEGTDRILEFVLGICRAIRNIPTRIRQGFETALL

SEQ ID NO: 100 - protein, 849 aa, Artificial Sequence
  Description of Artificial Sequence: Synthetic polypeptide
MRVMGIQRNYPQWWIWSMLGFWMLMICNGMWVTVYYGVPVWKEAKTTLFCASDAKAYEKEVHNVWATHACVPTDPNPQEMVLKNVTENFNMWKNDMVDQMHEDVISLWDQSLKPCVKLTPLCVTLSCTNATNATASNSSILEGMKNCSFNITTELRDKREKKNALFYKLDIVQLDGNSSQYRLINCNTSVITQACPKVSFDPIPIHYCAPAGYAILKCNNKTFNGTGPCNNVSTVQCTHGIKPVVSTQLLLNGSLAEGEIIIRSKNITDNGKTIIVHLNESVKIECTRPSNNTRTSIRIGPGQAFYATGQVIGDIREAHCNISESKWNETLQRVSEKLKEYFPHKNITFQPSSGGDLEITTHSFNCGGEFFYCNTSSLFNRTYMATSTDMANSTETNSTRIITIRCRIKQIINMWQEVGRAMYAPPIAGNITCISNITGLLLTRDGGKNDTDTFRPEGGNMKDNWRSELYKYKVVEVKPLGVAPTNARRRVVEREKRAVGMGAVFLGFLGAAGSTMGAASITLTVQARQLLSGIVQQQSNLLKAIEAQQHMLKLTVWGIKQLQARVLALERYLKDQQLLGMWGCSGKLICTTNVYWNSSWSNKTYGDIWDNMTWMQWEREISNYTELIYELLEESQNQQEKNEQDLLALDRWNSLWNWFNITNWLWYIKIFIMIVGGLIGLRIIFAVLSLVNRVRQGYSPLSLQTLIPSPRGPDRPGGIEEEGGEQDRNRSTRLVSGFLALAWDDLRSLCLFIYHRLRDFILIAARAGELLGRSSLKGLRRGWEALKYLGNLVQYWGLELKRSAISLLDTLAIAVGEGTDRILEFVLGICRAIRNIPTRIRQGFETALL

SEQ ID NO: 101 - protein, 856 aa, Artificial Sequence
  Description of Artificial Sequence: Synthetic polypeptide
MRVMGIQRNYPQWWIWSMLGLWMLMICNGMWVTVYYGVPVWKKAKTTLFCASDAKAYEKEVHSVWATHACVPTDPNPQEMVLKNVTENFNMWKNDMVDQMHEDVISLWDQSLKPCVKLTPLCVTLNCTDANATASNSSIIKGMNSSMIEEMKNCSFNITTELRDKREKKNALFYKLDIVQLDGNSSQYRLINCNTSVITQACPKVSFDPIPIHYCAPAGYAILKCNNKTFNGTGPCNNVSTVQCTHGIKPVVSTQLLLNGSLAEGEIIIRSENITNSAKTIIVHLNESVKIECTRPSNNTRTSIRIGPGQAFYATGQVIGDIRKAHCNISESKWNETLQRVSKKLKEYFPDRNITFQPSSGGDPEITTHSFNCGGKFFYCNTSSLFNRTYMANSTDMANSTETNSTRIITIRCRIKQIINMWQEVGRAMYAPPIAGNITCISNITGLLLTRDGGNNNTETFRPVGGNMKDNWRSKLYKYKVVEVKPLGVAPTKARRRMVEREKRAVGMGAVFLGFLGAAGSTMGAASITLTVQARQLLSGIVQQQSNLLKAIEAQQHMLKLTVWGIKQLQARVLALERYLKDQQLLGMWGCSGKLICTTNVYWNSSWSNKTYGDIWDNMTWMQWEREISNYTEIIYDLLEESQNQQEKNEQDLLALDRWNSLWNWFNITKWLWYIKIFIMIVGGLIGLKIIFAVLSLVNRVRQGYSPLSLQTLIPSPRGPDRPGGIEEEGGEQDRNRSTRLVSGFLALAWDDLRSLCLFIYHRLRDFILIAARAGELLGRSSLKGLRRGWEALKYLEGLVQYWGLELKRSAISLLDTLAIAVGEGTDRILEFVLGICRAIRNIPTRIRQGFETALL

SEQ ID NO: 102 - protein, 862 aa, Artificial Sequence
  Description of Artificial Sequence: Synthetic polypeptide
MRVMGRQRNYPQWWIWSMLGLWMLMICNGMWVTVYYGVPVWKEAKTTLFCASDAKAYEKEVHNVWATHACVPTDPNPQEMVLKNVTENFNMWENDMVDQMHEDVISLWDQSLKPCVKLTPLCVTLNCTDANATASNTNATASNINATASKNSIIEEMKNCSFNITTELRDKREKKYALFYKLDIVQLDGNSSQYRLINCNTSVITQACPKVSFDPIPIHYCAPAGYAILKCNNKTFNGTGPCNNVSTVQCTHGIKPVVSTQLLLNGSLAEGEIIIRSKNITDNGKTIIVHLNESVKIECTRPSNNTRTSIRIGPGQAFYATGQVIGDIREAHCNISESKWNETLQRVSKKLKEYFPDKNITFQSSSGGDPEITTHSFNCGGEFFYCNTSSLFNRTYMANSTDMANSTETNSTRIITIRCRIKQIINMWQEVGRAMYAPPIAGNITCISNITGLLLTRDGGNSSTETFRPEGGNMKDNWRSELYKYKVVEVKPLGVAPTNARRRVVEREKRAVGMGAVFLGFLGAAGSTMGAASITLTVQARQLLSGIVQQQSNLLKAIEAQQHMLKLTVWGIKQLQARVLALERYLKDQQLLGMWGCSGKLICTTNVYWNSSWSNKTYDDIWDNMTWMQWEREISNYTEMIYDLLEESQNQQEKNEQDLLALDRWNSLWNWFNITKWLWYIKIFIMIVGGLIGLRIIFAVLSLVNRVRQGYSPLSLQTLIPSPRGPDRPGGIEEEGGEQDRKRSTRLVSGFLALVWDDLRSLCLFIYHRLRDFILIAARAGELLGRSSLKGLRRGWEALKYLGSLVQYWGLELKRSAISLLDTLAIAVGEGTDRILEFVLGICRAIRNIPTRIRQGFETALL

SEQ ID NO: 103 - protein, 863 aa, Artificial Sequence
  Description of Artificial Sequence: Synthetic polypeptide
MRVMGIQRNYPQWWIWSMLGLWMLMICNGMWVTVYYGVPVWKEAKTTLFCASDAKAYEKEAHNVWATHACVPTDPNPQEMVLKNVTENFNMWKNDMADQMHEDVISLWDQSLKPCVKLTPLCVTLNCTDANATASNANATASNTNATVSNSSIIEEMKNCSFNITTELRDKREKKYALFYKLDIVQLDGNSSQYRLINCNTSVITQACPKVSFDPIPIHYCAPAGYAILKCNNKTFNGTGPCNNVSTVQCTHGIKPVVSTQLLLNGSLAEGEIIIRSENITNSAKTIIVHLNESVKIECTRPSNNTRTSIRIGPGQAFYATGQVIGDIRKAHCNISESKWNETLQRVSKKLKEYFPHKNITFQPSSGGDPEITTHSFNCGGEFFYCNTSSLFNRTYMANSTETNSTRTITLHCRIKQIINMWQEVGRAMYAPPIAGNITCISNITGLLLTRDGGENTRDGGNNNTETFRPGGGNMKDNWRSELYKYKVVEVKPLGVAPTNARRRVVEREKRAVGMGAVFLGFLGAAGSTMGAASITLTVQARQLLSGIVQQQSNLLKAIEAQQHMLKLTVWGIKQLQARVLALERYLKDQQLLGMWGCSGKLICTTNVYWNSSWSNKTYGDIWDNMTWMQWEREISNYTDIIYDLLEESQNQQEKNEQDLLALDRWNSLWNWFNITKWLWYIKIFIMIVGGLIGLRIIFAVLSLVNRVRQGYSPLSLQTLIPSPRGPDRPGGIEEEGGEQDRNRSTRLVSGFLALAWDDLRSLCLFIYHRLRDFILIAARAGELLGRSSLKGLRRGWEALKYLGGLVQYWGLELKRSAISLLDTLAIAVGEGTDRILEFVLGICRAIRNIPTRIRQGFETALL

SEQ ID NO: 104 - protein, 851 aa, Artificial Sequence
  Description of Artificial Sequence: Synthetic polypeptide
MRVMGIQRSYPQWWIWSMLGFWMLMICNGMWVTVYYGVPVWKEAKTTLFCASDAKAYEKEVHNVWATHACVPTDPNPQEMVLKNVTENFNMWKNDMVDQMHEDVISLWDQSLKPCVKLTPLCVTLSCINATNATDSNNSILEGMKNCSFNITTELRDKREKKNALFYKLDIVQLYGNSSQYRLINCNTSVITQACPKVSFDPIPIHYCAPAGYAILKCNNKTFNGTGPCNNVSTVQCTHGIKPVVSTQLLLNGSLAEGEIIIRSKNITDNGKTIIVHLNESVKIECTRPSNNTRTSIRIGPGQAFYATGQVIGNIREAHCNISESKWNETLQRVSEKLKEYFPDKNITFQPSSGGDLEITTHSFNCGGEFFYCNTSSLFNRTYMATSTDMANSTETNSTRIITIHCRIKQIINMWQEVGRAMYAPPIAGNITCISNITGLLLTRDGGNNTEDTETFRPEGGNMKDNWRSELYKYKVVEVKPLGVAPTNARRRVVEREKRAVGMGAVFLGFLGAAGSTMGAASITLTVQARQLLSGIVQQQSNLLKAIEAQQHMLKLTVWGIKQLQARVLALERYLKDQQLLGMWGCSGKLICTTNVYWNSSWSNKTYSDIWDNMTWMQWEREISNYTDMIYELLEESQNQQEKNEQDLLALDRWNSLWNWFNITNWLWYIKIFIMIVGGLIGLRIIFAVLSLVNRVRQGYSPLSLQTLIPSPRGPDRPGGIEEEGGEQDRNRSTRLVSGFLALAWDDLRSLCLFIYHRLRDFILIAARAGELLGRSSLKGLRRGWEALKYLGSLGQYWGLELKRSAISLLDTLAIAVGEGTDRILEFVLGICRAIRNIPTRIRQGFETALL

SEQ ID NO: 105 - protein, 852 aa, Artificial Sequence
  Description of Artificial Sequence: Synthetic polypeptide
MRVMGTQRNYPQWWIWSMLGLWMLMICNGMWVTVYYGVPVWKEAKTTLFCASDAKAYEKEVHNVWATHACVPTDPNPQEMVLKNVTENFNMWKNDMADQMHEDVISLWDQSLKPCVKLTPLCVTLYCINATANATVSNSSIIEEMKNCSFNITTELRDKREKKNALFYKLDIVQLDGNSSQYRLINCNTSAITQACPKVSFDPIPIHYCAPAGYAILKCNNKTFNGTGPCNNVSTVQCTHGIKPVVSTQLLLNGSLAEGEIIIRSENITNSAKTIIVHLNESVKIECTRPSNNTRTSIRIGPGQAFYATGQVIGDIRQAHCNISESKWNETLQRVSEKLKEYFPNKTITFQPSSGGDPEITTHSFNCGGEFFYCNTSSLFNRTYMANSTDMANSTETNSTRTITLHCRIKQIINMWQEVGRAMYAPPIAGNITCISNITGLLLTRDGGNSSKETETFRPGGGNMKDNWRSELYKYKVVEVKPLGVAPTNARRRVVEREKRAVGMGAVFLGFLGAAGSTMGAASITLTVQARQLLSGIVQQQSNLLKAIEAQQHMLKLTVWGIKQLQARVLALERYLKDQQLLGMWGCSGKLICTTNVYWNSSWSNKTYGDIWDNMTWMQWEREISNYTDLIYDLLEESQNQQEKNEQDLLALDRWNSLWNWFNITKWLWYIKIFIMIVGGLIGLRIIFAVLSLVNRVRQGYSPLSLQTLIPSPRGPDRPGGIEEEGGEQDRNRSTRLVSGFLALAWDDLRSLCLFLYHRLRDFILIAARAGELLGRSSLKGLRRGWEALKYLGGLVQYWGLELKRSAISLLDTLAIAVGEGTDRILEFVLGICRAIRNIPTRIRQGFETALL

SEQ ID NO: 106 - protein, 857 aa, Artificial Sequence
  Description of Artificial Sequence: Synthetic polypeptide
MRVRGIQRNYPQWWIWSMLGLWMLMICNGMWVTVYYGVPVWKEAKTTLFCASDAKAYEKEAHNVWATHACVPTDPNPQEMVLKNVTENFNMWENDMVDQMHEDVISLWDQSLKPCVKLTPLCVTLNCTDANATASNTNATVSNIKATVSNSSIIEEMKNCSFNITTELRDKIEKKYALFYKLDIVQLDGNSTQYRFINCNTSAITQACPKVSFDPIPIHYCAPAGYAILKCNNKTFNGTGPCNNVSTVQCTHGIKPVVSTQLLLNGSLAEGEIIIRSENITDNGKTIIVHLNESVKIECTRPGNNTRTSIRIGPGQAFYATGQVIGDIRQAHCNISESKWNETLQRVSEKLKEYFPNKTITFQPSSGGDPEITTHSFNCGGEFFYCNTSSLFNRTYMANSTETNSTRTITLHCRIKQIINMWQEVGRAMYAPPIAGNITCISNITGLLLTRDGGNTTDIETFRPGGGNMKDNWRSELYKYKVVEVKPLGVAPTKARRRVVEREKRAVGMGAVFLGFLGAAGSTMGAASITLTVQARQLLSGIVQQQSNLLKAIEAQQHMLKLTVWGIKQLQARVLALERYLKDQQLLGMWGCSGKLICTTNVYWNSSWSNKTYDDIWDNMTWMQWEREISNYTEIIYDLLEESQNQQEKNEQDLLALDRWNSLWNWFNITKWLWYIKIFIMIVGGLIGLRIIFAVLSLVNRVRQGYSPLSLQTLIPSPRGPDRPGGIEEEGGEQDRNRSTRLVSGFLALAWDDLRSLCLFIYHRLRDFILIAARAGELLGRSSLKGLRRGWEALKYLGGIVQYWGLELKRSAISLLDTLAIAVGEGTDRILEFVLGICRAIRNIPTRIRQGFETALL

SEQ ID NO: 107 - protein, 858 aa, Artificial Sequence
  Description of Artificial Sequence: Synthetic polypeptide
MRVMGRQRNYPQWWIWSMLGLWMLMICNGMWVTVYYGVPVWKEAKTTLFCASDAKAYEKEVHNVWATHACVPTDPNPQEMVLKNVTENFNMWKNDMVDQMHEDVISLWDQSLTPCVKLTPLCVTLNCTDANDTASNSSIIKGMNNSIVGEMKNCSFNITTELRDKREKKNALFYKLDIVQLDGNSSEYRLINCNTSVITQACPKVSFDPIPIHYCAPAGYAILKCNNKTFNGTGPCNNVSTVQCTHGIKPVVSTQLLLNGSLAEGEIIIRSENITDNAKTIIVHLNESVKIECTRPSNNTRTSIRIGPGQAFYATGQVIGDIRKAHCNISESKWNETLQRVSKKLKEYFPDKNITFQPSSGGDPEITTHSFNCGGEFFYCNTSSLFNRTYMANSTDMANSAETNSTRTITLHCRIKQIINMWQEVGRAMYAPPIAGNITCISNITGLLLTRDGGNSSTETETFRPGGGNMKDNWRSELYKYKVVEVKPLGVAPTNARRRVVEREKRAVGMGAVFLGFLGAAGSTMGAASITLTVQARQLLSGIVQQQSNLLKAIEAQQHMLRLTVWGIKQLQARVLALERYLKDQQLLGMWGCSGKLICTTNVYWNSSWSNKTYDDIWDNMTWMQWEGEISNYTNIIYDLLEESQNQQEKNEQDLLALDRWNSLWNWFNITNWLWYIKIFIMIVGGLIGLRIIFAVLSLVNRVRQGYSPLSLQTLIPSPRGPDRPGGIEEEGGEQDRKRSTRLVSGFLALVWDDLRSLCLFLYHRLRDFILIAARAGELLGRSSLKGLRRGWEALKYLGSLVQYWGLELKRSAISLLDTLAIAVGEGTDRILEFVLGICRAIRNIPTRIRQGFETALL

SEQ ID NO: 108 - protein, 862 aa, Artificial Sequence
  Description of Artificial Sequence: Synthetic polypeptide
MRVMGRQRNYPQWWIWSTLGLRMLMICNGMWVTVYYGVPVWKEAKTTLFCASDAKAYEKEVHNVWATHACVPTDPNPQEMVLKNVTENFNMWENDMVDQMHEDVISLWDQSLKPCVKLTPLCVTLNCTDANATASNANATVSNTNATVSNDSSIIEEMKNCSFNITTELRDKIEKKYALFYKLDIVQLDGNSTHYRFINCNTSAITQACPKVSFDPIPIHYCAPAGYAILKCNNKTFNGTGPCNNVSTVQCTHGIKPVVSTQLLLNGSLAEGEIIIRSENITDNAKTIIVHLNESVKIECTRPSNNTRTSIGIGPGQAFYATGQVIGDIRKAHCNISESKWNETLQRVSKKLKEYFPGKNITFQPSSGGDPEVTTHSFNCGGEFFYCNTSSLFNRTYMTNSTDMANSTETNRTITIHCRIKQIINMWQEVGRAMYAPPIAGNITCISNITGLLLTRDGGNNTDPEIFRPGGGNMKDNWRSELYKYKVVEVKPLGVAPTNARRRVVEREKRAVGMGAVFLGFLGAAGSTMGAASITLTVQARQLLSGIVQQQSNLLKAIEAQQHMLRLTVWGIKQLQARVLALERYLKDQQLLGMWGCSGKLICTTNVYWNSSWSNKTYGDIWDNMTWMQWESEISNYTNIIYDLLEESQNQQEKNEQDLLALDRWNSLWNWFNITKWLWYIKIFIMIVGGLIGLRIIFAVLSLVNRVRQGYSPLSLQTLIPSPRGPDRPGGIEEEGGEQDRKRSTRLVSGFLALVWDDLRSLCLFLYHRLRDFILIAARAGELLGRSSLKGLRRGWEALKYLGSLVQYWGLELKRSAISLLDTLAIAVGEGTDRILEFVLGICRAIRNIPTRIRQGFETALL

SEQ ID NO: 109 - DNA, 2541 bp, Artificial Sequence; identical to SEQ ID NO: 28
  Description of Artificial Sequence: Synthetic polynucleotide

SEQ ID NO: 110 - DNA, 2541 bp, Artificial Sequence
  Description of Artificial Sequence: Synthetic polynucleotide
atgagagtgatggggatacagaggaattatccacaatggtggatatggagcatgttaggcttttggatgctaatgatttgtaatgggatgtgggtcacagtctactatggggtacctgtgtggaaagaagcaaaaactactctattttgtgcatcagatgctaaagcatatgagaaagaagtgcataatgtctgggctacacatgcctgtgtacccacagaccccaatccacaagaaatggttttaaaaaatgtaacagaaaatttcaacatgtggaaaaatgacatggtggatcagatgcatgaagatgtaattagtttatgggatcaaagcctcaagccatgtgtaaagttgaccccactctgtgtcactctaaactgtaccaatgctactgccagcaatagcagtataatagagggaatgaaaaattgctctttcaatataaccacagaattaagagataagagagagaaaaagaatgcacttttttataaacttgatatagtacaactagatggcaactctagtcagtatagattaataaattgtaatacctcagtcataacacaagcctgtccaaaggtctcttttgacccaattcctatacattattgtgctccagctggttatgcgattctaaagtgtaataataagacattcactggaacaggaccgtgtaataatgtcagcacagtacaatgtacacatggaattaagccagtggtttcaactcaactattgttaaatggtagcctagcagaaggagagataataattagatctgaaaatataacaaacaatgacaaaacaataatagtacatctcaatgaatctgtaaagattgagtgtacgagacccaataataaaacaagaacaagtataagaataggaccaggacaagcattttatgcaacaggacaagtaataggagacataagagaagcatattgtaacattaatgaaagtaaatggaatgaaactttacaaagggtaagtaaaaaattaaaagaatacttccctcataagaatataacatttcaaccatcctcaggaggggacctagaaattacaacacatagctttaattgtggaggagaatttttctattgcaatacatcaagcctgtttaataggacatatatggctaatagtacagatatggctaatagtacagaaactaacagtacacgaaccatcacaatccactgcagaataaaacaaattataaacatgtggcaggaggtgggacgagcaatgtatgcccctcccattgcaggaaacataacatgtatatcaaatatcacaggactactattgacaagggatggaggaaaaaacaatacggagacattcagacctggaggaggaaatatgaaggacaattggagaagtgaattatataaatataaagtggtagaagttaagccattaggagtagcacccactaatgcaagaaggagagtggtggagagagaaaaaagagcagtgggaatgggagctgtgttccttgggttcttgggagcggcaggaagcactatgggcgcagcatcaataacgctgacggtacaggccagacaattattgtctggtatagtgcaacagcaaagcaatttgctgaaggctatagaggctcaacagcatatgttgaaactcacggtctggggcattaaacagctccaggcaagagtcctggccttggaaagatacctaaaggatcaacagctcctagggatgtggggctgctctggaaaactcatctgcaccactaatgtatattggaactctagttggagtaataaaacttatggtgatatttgggataacatgacctggatgcagtgggagagagaaattagcaattatacagaaataatatatgaattgcttgaagaatcacaaaaccagcaggaaaagaatgaacaagatttactagcattggacagatggaacagtctgtggaattggtttaacataacaaattggctgtggtatataaaaatattcataatgatagtaggaggcttgataggtttaagaataatttttgctgtgctttctttagtaaatagagttaggcagggatactcacctctgtcgttgcagacccttatcccaagcccgaggggaccagacaggcccggaggaatcgaagaagaaggtggagagcaagacagaaacagatcaacgcgattagtgagcggattcttagcgcttgtctgggacgacctgcggagcctgtgccttttcatctaccaccgattgagagacttcatattaattgcagcgagagcgggggaacttctgggacgcagcagtctcaagggactacggagaggatgggaagcccttaagtatctgggaagtcttgtgcagtattggggcctggaactaaaaaggagtgctattagtctattggataccctagcaatagcagtaggtgaaggaacagataggattctagaatttgtattaggaatttgtagagctatccgcaacatacctacaagaataagacagggctttgaaacagctttgctataa

SEQ ID NO: 111 - DNA, 2541 bp, Artificial Sequence
  Description of Artificial Sequence: Synthetic polynucleotide
atgagagtgatggggatacagaggaattatccacaatggtggatatggagcatgttaggcttttggatgctaatgatttgtaatgggatgtgggtcacagtctactatggggtacctgtgtggaaagaagcaaaaactactctattttgtgcatcagatgctaaagcatatgagaaagaagtgcataatgtctgggctacacatgcctgtgtacccacagaccccaatccacaagaaatggttttaaaaaatgtaacagaaaatttcaacatgtggaaaaatgacatggtggatcagatgcatgaagatgtaattagtttatgggatcaaagcctcaagccatgtgtaaagttgaccccactctgtgtcactctaaactgtaccaatgctactgccagcaatagcagtataatagagggaatgaaaaattgctctttcaatataaccacagaattaagagataagagagagaaaaagaatgcacttttttataaacttgatatagtacaactagatggcaactctagtcagtatagattaataaattgtaatacctcagtcataacacaagcctgtccaaaggtctcttttgacccaattcctatacattattgtgctccagctggttatgcgattctaaagtgtaataataagacattcactggaacaggaccgtgtaataatgtcagcacagtacaatgtacacatggaattaagccagtggtttcaactcaactattgttaaatggtagcctagcagaaggagagataataattagatctgaaaatataacaaacaatggcaaaacaataatagtacatctcaatgaatctgtaaagattgagtgtacgagacccaataataaaacaagaacaagtataagaataggaccaggacaagcattttatgcaacaggacaagtaataggagacataagagaagcatattgtaacattaatgaaagtaaatggaatgaaactttacaaagggtaagtaaaaaattaaaagaatacttccctcataagaatataacatttcaaccatcctcaggaggggacctagaaattacaacacatagctttaattgtggaggagaatttttctattgcaatacatcaagcctgtttaataggacatatatggctaatagtacagatatggctaatagtacagaaactaacagtacacgaaccatcacaatccactgcagaataaaacaaattataaacatgtggcaggaggtgggacgagcaatgtatgcccctcccattgcaggaaacataacatgtatatcaaatatcacaggactactattgacaagggatggaggaaaaaacaatacggagacattcagacctggaggaggaaatatgaaggacaattggagaagtgaattatataaatataaagtggtagaagttaagccattaggagtagcacccactaatgcaagaaggagagtggtggagagagaaaaaagagcagtgggaatgggagctgtgttccttgggttcttgggagcggcaggaagcactatgggcgcagcatcaataacgctgacggtacaggccagacaattattgtctggtatagtgcaacagcaaagcaatttgctgaaggctatagaggctcaacagcatatgttgaaactcacggtctggggcattaaacagctccaggcaagagtcctggccttggaaagatacctaaaggatcaacagctcctagggatgtggggctgctctggaaaactcatctgcaccactaatgtatattggaactctagttggagtaataaaacttatggtgatatttgggataacatgacctggatgcagtgggagagagaaattagcaattatacagaaataatatatgaattgcttgaagaatcacaaaaccagcaggaaaagaatgaacaagatttactagcattggacagatggaacagtctgtggaattggtttaacataacaaattggctgtggtatataaaaatattcataatgatagtaggaggcttgataggtttaagaataatttttgctgtgctttctttagtaaatagagttaggcagggatactcacctctgtcgttgcagacccttatcccaagcccgaggggaccagacaggcccggaggaatcgaagaagaaggtggagagcaagacagaaacagatcaacgcgattagtgagcggattcttagcgcttgtctgggacgacctgcggagcctgtgccttttcatctaccaccgattgagagacttcatattaattgcagcgagagcgggggaacttctgggacgcagcagtctcaagggactacggagaggatgggaagcccttaagtatctgggaagtcttgtgcagtattggggcctggaactaaaaaggagtgctattagtctattggataccctagcaatagcagtaggtgaaggaacagataggattctagaatttgtattaggaatttgtagagctatccgcaacatacctacaagaataagacagggctttgaaacagctttgctataa

SEQ ID NO: 112 - DNA, 2541 bp, Artificial Sequence
  Description of Artificial Sequence: Synthetic polynucleotide
atgagagtgatggggatacagaggaattatccacaatggtggatatggagcatgttaggcttttggatgctaatgatttgtaatgggatgtgggtcacagtctactatggggtacctgtgtggaaagaagcaaaaactactctattttgtgcatcagatgctaaagcatatgagaaagaagtgcataatgtctgggctacacatgcctgtgtacccacagaccccaatccacaagaaatggttttaaaaaatgtaacagaaaatttcaacatgtggaaaaatgacatggtggatcagatgcatgaagatgtaattagtttatgggatcaaagcctcaagccatgtgtaaagttgaccccactctgtgtcactctaaactgtaccaatgctactgccagcaatagcagtataatagagggaatgaaaaattgctctttcaatataaccacagaattaagagataagagagagaaaaagaatgcacttttttataaacttgatatagtacaactagatggcaactctagtcagtatagattaataaattgtaatacctcagtcataacacaagcctgtccaaaggtctcttttgacccaattcctatacattattgtgctccagctggttatgcgattctaaagtgtaataataagacattcactggaacaggaccgtgtaataatgtcagcacagtacaatgtacacatggaattaagccagtggtttcaactcaactattgttaaatggtagcctagcagaaggagagataataattagatctgaaaatataacagacaatggcaaaacaataatagtacatctcaatgaatctgtaaagattgagtgtacgagacccaataataaaacaagaacaagtataagaataggaccaggacaagcattttatgcaacaggacaagtaataggagacataagagaagcatattgtaacattaatgaaagtaaatggaatgaaactttacaaagggtaagtaaaaaattaaaagaatacttccctcataagaatataacatttcaaccatcctcaggaggggacctagaaattacaacacatagctttaattgtggaggagaatttttctattgcaatacatcaagcctgtttaataggacatatatggctaatagtacagatatggctaatagtacagaaactaacagtacacgaaccatcacaatccactgcagaataaaacaaattataaacatgtggcaggaggtgggacgagcaatgtatgcccctcccattgcaggaaacataacatgtatatcaaatatcacaggactactattgacaagggatggaggaaaaaacaatacggagacattcagacctggaggaggaaatatgaaggacaattggagaagtgaattatataaatataaagtggtagaagttaagccattaggagtagcacccactaatgcaagaaggagagtggtggagagagaaaaaagagcagtgggaatgggagctgtgttccttgggttcttgggagcggcaggaagcactatgggcgcagcatcaataacgctgacggtacaggccagacaattattgtctggtatagtgcaacagcaaagcaatttgctgaaggctatagaggctcaacagcatatgttgaaactcacggtctggggcattaaacagctccaggcaagagtcctggccttggaaagatacctaaaggatcaacagctcctagggatgtggggctgctctggaaaactcatctgcaccactaatgtatattggaactctagttggagtaataaaacttatggtgatatttgggataacatgacctggatgcagtgggagagagaaattagcaattatacagaaataatatatgaattgcttgaagaatcacaaaaccagcaggaaaagaatgaacaagatttactagcattggacagatggaacagtctgtggaattggtttaacataacaaattggctgtggtatataaaaatattcataatgatagtaggaggcttgataggtttaagaataatttttgctgtgctttctttagtaaatagagttaggcagggatactcacctctgtcgttgcagacccttatcccaagcccgaggggaccagacaggcccggaggaatcgaagaagaaggtggagagcaagacagaaacagatcaacgcgattagtgagcggattcttagcgcttgtctgggacgacctgcggagcctgtgccttttcatctaccaccgattgagagacttcatattaattgcagcgagagcgggggaacttctgggacgcagcagtctcaagggactacggagaggatgggaagcccttaagtatctgggaagtcttgtgcagtattggggcctggaactaaaaaggagtgctattagtctattggataccctagcaatagcagtaggtgaaggaacagataggattctagaatttgtattaggaatttgtagagctatccgcaacatacctacaagaataagacagggctttgaaacagctttgctataa

SEQ ID NO: 113 - DNA, 2541 bp, Artificial Sequence
  Description of Artificial Sequence: Synthetic polynucleotide
atgagagtgatggggatacagaggaattatccacaatggtggatatggagcatgttaggcttttggatgctaatgatttgtaatgggatgtgggtcacagtctactatggggtacctgtgtggaaagaagcaaaaactactctattttgtgcatcagatgctaaagcatatgagaaagaagtgcataatgtctgggctacacatgcctgtgtacccacagaccccaatccacaagaaatggttttaaaaaatgtaacagaaaatttcaacatgtggaaaaatgacatggtggatcagatgcatgaagatgtaattagtttatgggatcaaagcctcaagccatgtgtaaagttgaccccactctgtgtcactctaaactgtaccaatgctactgccagcaatagcagtataatagagggaatgaaaaattgctctttcaatataaccacagaattaagagataagagagagaaaaagaatgcacttttttataaacttgatatagtacaactagatggcaactctagtcagtatagattaataaattgtaatacctcagtcataacacaagcctgtccaaaggtctcttttgacccaattcctatacattattgtgctccagctggttatgcgattctaaagtgtaataataagacattcactggaacaggaccgtgtaataatgtcagcacagtacaatgtacacatggaattaagccagtggtttcaactcaactattgttaaatggtagcctagcagaaggagagataataattagatctaaaaatataacagacaatggcaaaacaataatagtacatctcaatgaatctgtaaagattgagtgtacgagacccaataataaaacaagaacaagtataagaataggaccaggacaagcattttatgcaacaggacaagtaataggagacataagagaagcatattgtaacattaatgaaagtaaatggaatgaaactttacaaagggtaagtaaaaaattaaaagaatacttccctcataagaatataacatttcaaccatcctcaggaggggacctagaaattacaacacatagctttaattgtggaggagaatttttctattgcaatacatcaagcctgtttaataggacatatatggctaatagtacagatatggctaatagtacagaaactaacagtacacgaaccatcacaatccactgcagaataaaacaaattataaacatgtggcaggaggtgggacgagcaatgtatgcccctcccattgcaggaaacataacatgtatatcaaatatcacaggactactattgacaagggatggaggaaaaaacaatacggagacattcagacctggaggaggaaatatgaaggacaattggagaagtgaattatataaatataaagtggtagaagttaagccattaggagtagcacccactaatgcaagaaggagagtggtggagagagaaaaaagagcagtgggaatgggagctgtgttccttgggttcttgggagcggcaggaagcactatgggcgcagcatcaataacgctgacggtacaggccagacaattattgtctggtatagtgcaacagcaaagcaatttgctgaaggctatagaggctcaacagcatatgttgaaactcacggtctggggcattaaacagctccaggcaagagtcctggccttggaaagatacctaaaggatcaacagctcctagggatgtggggctgctctggaaaactcatctgcaccactaatgtatattggaactctagttggagtaataaaacttatggtgatatttgggataacatgacctggatgcagtgggagagagaaattagcaattatacagaaataatatatgaattgcttgaagaatcacaaaaccagcaggaaaagaatgaacaagatttactagcattggacagatggaacagtctgtggaattggtttaacataacaaattggctgtggtatataaaaatattcataatgatagtaggaggcttgataggtttaagaataatttttgctgtgctttctttagtaaatagagttaggcagggatactcacctctgtcgttgcagacccttatcccaagcccgaggggaccagacaggcccggaggaatcgaagaagaaggtggagagcaagacagaaacagatcaacgcgattagtgagcggattcttagcgcttgtctgggacgacctgcggagcctgtgccttttcatctaccaccgattgagagacttcatattaattgcagcgagagcgggggaacttctgggacgcagcagtctcaagggactacggagaggatgggaagcccttaagtatctgggaagtcttgtgcagtattggggcctggaactaaaaaggagtgctattagtctattggataccctagcaatagcagtaggtgaaggaacagataggattctagaatttgtattaggaatttgtagagctatccgcaacatacctacaagaataagacagggctttgaaacagctttgctataa

SEQ ID NO: 114 - DNA, 2541 bp, Artificial Sequence
  Description of Artificial Sequence: Synthetic polynucleotide
atgagagtgatggggatacagaggaattatccacaatggtggatatggagcatgttaggcttttggatgctaatgatttgtaatgggatgtgggtcacagtctactatggggtacctgtgtggaaagaagcaaaaactactctattttgtgcatcagatgctaaagcatatgagaaagaagtgcataatgtctgggctacacatgcctgtgtacccacagaccccaatccacaagaaatggttttaaaaaatgtaacagaaaatttcaacatgtggaaaaatgacatggtggatcagatgcatgaagatgtaattagtttatgggatcaaagcctcaagccatgtgtaaagttgaccccactctgtgtcactctaaactgtaccaatgctactgccagcaatagcagtataatagagggaatgaaaaattgctctttcaatataaccacagaattaagagataagagagagaaaaagaatgcacttttttataaacttgatatagtacaactagatggcaactctagtcagtatagattaataaattgtaatacctcagtcataacacaagcctgtccaaaggtctcttttgacccaattcctatacattattgtgctccagctggttatgcgattctaaagtgtaataataagacattcactggaacaggaccgtgtaataatgtcagcacagtacaatgtacacatggaattaagccagtggtttcaactcaactattgttaaatggtagcctagcagaaggagagataataattagatctaaaaatataacagacaatagcaaaacaataatagtacatctcaatgaatctgtaaagattgagtgtacgagacccaataataaaacaagaacaagtataagaataggaccaggacaagcattttatgcaacaggacaagtaataggagacataagagaagcatattgtaacattaatgaaagtaaatggaatgaaactttacaaagggtaagtaaaaaattaaaagaatacttccctcataagaatataacatttcaaccatcctcaggaggggacctagaaattacaacacatagctttaattgtggaggagaatttttctattgcaatacatcaagcctgtttaataggacatatatggctaatagtacagatatggctaatagtacagaaactaacagtacacgaaccatcacaatccactgcagaataaaacaaattataaacatgtggcaggaggtgggacgagcaatgtatgcccctcccattgcaggaaacataacatgtatatcaaatatcacaggactactattgacaagggatggaggaaaaaacaatacggagacattcagacctggaggaggaaatatgaaggacaattggagaagtgaattatataaatataaagtggtagaagttaagccattaggagtagcacccactaatgcaagaaggagagtggtggagagagaaaaaagagcagtgggaatgggagctgtgttccttgggttcttgggagcggcaggaagcactatgggcgcagcatcaataacgctgacggtacaggccagacaattattgtctggtatagtgcaacagcaaagcaatttgctgaaggctatagaggctcaacagcatatgttgaaactcacggtctggggcattaaacagctccaggcaagagtcctggccttggaaagatacctaaaggatcaacagctcctagggatgtggggctgctctggaaaactcatctgcaccactaatgtatattggaactctagttggagtaataaaacttatggtgatatttgggataacatgacctggatgcagtgggagagagaaattagcaattatacagaaataatatatgaattgcttgaagaatcacaaaaccagcaggaaaagaatgaacaagatttactagcattggacagatggaacagtctgtggaattggtttaacataacaaattggctgtggtatataaaaatattcataatgatagtaggaggcttgataggtttaagaataatttttgctgtgctttctttagtaaatagagttaggcagggatactcacctctgtcgttgcagacccttatcccaagcccgaggggaccagacaggcccggaggaatcgaagaagaaggtggagagcaagacagaaacagatcaacgcgattagtgagcggattcttagcgcttgtctgggacgacctgcggagcctgtgccttttcatctaccaccgattgagagacttcatattaattgcagcgagagcgggggaacttctgggacgcagcagtctcaagggactacggagaggatgggaagcccttaagtatctgggaagtcttgtgcagtattggggcctggaactaaaaaggagtgctattagtctattggataccctagcaatagcagtaggtgaaggaacagataggattctagaatttgtattaggaatttgtagagctatccgcaacatacctacaagaataagacagggctttgaaacagctttgctataa

SEQ ID NO: 115 - DNA, 2541 bp, Artificial Sequence
  Description of Artificial Sequence: Synthetic polynucleotide
atgagagtgatggggatacagaggaattatccacaatggtggatatggagcatgttaggcttttggatgctaatgatttgtaatgggatgtgggtcacagtctactatggggtacctgtgtggaaagaagcaaaaactactctattttgtgcatcagatgctaaagcatatgagaaagaagtgcataatgtctgggctacacatgcctgtgtacccacagaccccaatccacaagaaatggttttaaaaaatgtaacagaaaatttcaacatgtggaaaaatgacatggtggatcagatgcatgaagatgtaattagtttatgggatcaaagcctcaagccatgtgtaaagttgaccccactctgtgtcactctaaactgtaccaatgctactgccagcaatagcagtataatagagggaatgaaaaattgctctttcaatataaccacagaattaagagataagagagagaaaaagaatgcacttttttataaacttgatatagtacaactagatggcaactctagtcagtatagattaataaattgtaatacctcagtcataacacaagcctgtccaaaggtctcttttgacccaattcctatacattattgtgctccagctggttatgcgattctaaagtgtaataataagacattcactggaacaggaccgtgtaataatgtcagcacagtacaatgtacacatggaattaagccagtggtttcaactcaactattgttaaatggtagcctagcagaaggagagataataattagatctgaaaatataacaaacagtggcaaaacaataatagtacatctcaatgaatctgtaaagattgagtgtacgagacccaataataaaacaagaacaagtataagaataggaccaggacaagcattttatgcaacaggacaagtaataggagacataagagaagcatattgtaacattaatgaaagtaaatggaatgaaactttacaaagggtaagtaaaaaattaaaagaatacttccctcataagaatataacatttcaaccatcctcaggaggggacctagaaattacaacacatagctttaattgtggaggagaatttttctattgcaatacatcaagcctgtttaataggacatatatggctaatagtacagatatggctaatagtacagaaactaacagtacacgaaccatcacaatccactgcagaataaaacaaattataaacatgtggcaggaggtgggacgagcaatgtatgcccctcccattgcaggaaacataacatgtatatcaaatatcacaggactactattgacaagggatggaggaaaaaacaatacggagacattcagacctggaggaggaaatatgaaggacaattggagaagtgaattatataaatataaagtggtagaagttaagccattaggagtagcacccactaatgcaagaaggagagtggtggagagagaaaaaagagcagtgggaatgggagctgtgttccttgggttcttgggagcggcaggaagcactatgggcgcagcatcaataacgctgacggtacaggccagacaattattgtctggtatagtgcaacagcaaagcaatttgctgaaggctatagaggctcaacagcatatgttgaaactcacggtctggggcattaaacagctccaggcaagagtcctggccttggaaagatacctaaaggatcaacagctcctagggatgtggggctgctctggaaaactcatctgcaccactaatgtatattggaactctagttggagtaataaaacttatggtgatatttgggataacatgacctggatgcagtgggagagagaaattagcaattatacagaaataatatatgaattgcttgaagaatcacaaaaccagcaggaaaagaatgaacaagatttactagcattggacagatggaacagtctgtggaattggtttaacataacaaattggctgtggtatataaaaatattcataatgatagtaggaggcttgataggtttaagaataatttttgctgtgctttctttagtaaatagagttaggcagggatactcacctctgtcgttgcagacccttatcccaagcccgaggggaccagacaggcccggaggaatcgaagaagaaggtggagagcaagacagaaacagatcaacgcgattagtgagcggattcttagcgcttgtctgggacgacctgcggagcctgtgccttttcatctaccaccgattgagagacttcatattaattgcagcgagagcgggggaacttctgggacgcagcagtctcaagggactacggagaggatgggaagcccttaagtatctgggaagtcttgtgcagtattggggcctggaactaaaaaggagtgctattagtctattggataccctagcaatagcagtaggtgaaggaacagataggattctagaatttgtattaggaatttgtagagctatccgcaacatacctacaagaataagacagggctttgaaacagctttgctataa

SEQ ID NO: 116 - DNA, 2541 bp, Artificial Sequence
  Description of Artificial Sequence: Synthetic polynucleotide
atgagagtgatggggatacagaggaattatccacaatggtggatatggagcatgttaggcttttggatgctaatgatttgtaatgggatgtgggtcacagtctactatggggtacctgtgtggaaagaagcaaaaactactctattttgtgcatcagatgctaaagcatatgagaaagaagtgcataatgtctgggctacacatgcctgtgtacccacagaccccaatccacaagaaatggttttaaaaaatgtaacagaaaatttcaacatgtggaaaaatgacatggtggatcagatgcatgaagatgtaattagtttatgggatcaaagcctcaagccatgtgtaaagttgaccccactctgtgtcactctaaactgtaccaatgctactgccagcaatagcagtataatagagggaatgaaaaattgctctttcaatataaccacagaattaagagataagagagagaaaaagaatgcacttttttataaacttgatatagtacaactagatggcaactctagtcagtatagattaataaattgtaatacctcagtcataacacaagcctgtccaaaggtctcttttgacccaattcctatacattattgtgctccagctggttatgcgattctaaagtgtaataataagacattcactggaacaggaccgtgtaataatgtcagcacagtacaatgtacacatggaattaagccagtggtttcaactcaactattgttaaatggtagcctagcagaaggagagataataattagatctgaaaatataacaaacagtgccaaaacaataatagtacatctcaatgaatctgtaaagattgagtgtacgagacccaataataaaacaagaacaagtataagaataggaccaggacaagcattttatgcaacaggacaagtaataggagacataagagaagcatattgtaacattaatgaaagtaaatggaatgaaactttacaaagggtaagtaaaaaattaaaagaatacttccctcataagaatataacatttcaaccatcctcaggaggggacctagaaattacaacacatagctttaattgtggaggagaatttttctattgcaatacatcaagcctgtttaataggacatatatggctaatagtacagatatggctaatagtacagaaactaacagtacacgaaccatcacaatccactgcagaataaaacaaattataaacatgtggcaggaggtgggacgagcaatgtatgcccctcccattgcaggaaacataacatgtatatcaaatatcacaggactactattgacaagggatggaggaaaaaacaatacggagacattcagacctggaggaggaaatatgaaggacaattggagaagtgaattatataaatataaagtggtagaagttaagccattaggagtagcacccactaatgcaagaaggagagtggtggagagagaaaaaagagcagtgggaatgggagctgtgttccttgggttcttgggagcggcaggaagcactatgggcgcagcatcaataacgctgacggtacaggccagacaattattgtctggtatagtgcaacagcaaagcaatttgctgaaggctatagaggctcaacagcatatgttgaaactcacggtctggggcattaaacagctccaggcaagagtcctggccttggaaagatacctaaaggatcaacagctcctagggatgtggggctgctctggaaaactcatctgcaccactaatgtatattggaactctagttggagtaataaaacttatggtgatatttgggataacatgacctggatgcagtgggagagagaaattagcaattatacagaaataatatatgaattgcttgaagaatcacaaaaccagcaggaaaagaatgaacaagatttactagcattggacagatggaacagtctgtggaattggtttaacataacaaattggctgtggtatataaaaatattcataatgatagtaggaggcttgataggtttaagaataatttttgctgtgctttctttagtaaatagagttaggcagggatactcacctctgtcgttgcagacccttatcccaagcccgaggggaccagacaggcccggaggaatcgaagaagaaggtggagagcaagacagaaacagatcaacgcgattagtgagcggattcttagcgcttgtctgggacgacctgcggagcctgtgccttttcatctaccaccgattgagagacttcatattaattgcagcgagagcgggggaacttctgggacgcagcagtctcaagggactacggagaggatgggaagcccttaagtatctgggaagtcttgtgcagtattggggcctggaactaaaaaggagtgctattagtctattggataccctagcaatagcagtaggtgaaggaacagataggattctagaatttgtattaggaatttgtagagctatccgcaacatacctacaagaataagacagggctttgaaacagctttgctataa

SEQ ID NO: 117 - DNA, 2541 bp, Artificial Sequence
  Description of Artificial Sequence: Synthetic polynucleotide
atgagagtgatggggatacagaggaattatccacaatggtggatatggagcatgttaggcttttggatgctaatgatttgtaatgggatgtgggtcacagtctactatggggtacctgtgtggaaagaagcaaaaactactctattttgtgcatcagatgctaaagcatatgagaaagaagtgcataatgtctgggctacacatgcctgtgtacccacagaccccaatccacaagaaatggttttaaaaaatgtaacagaaaatttcaacatgtggaaaaatgacatggtggatcagatgcatgaagatgtaattagtttatgggatcaaagcctcaagccatgtgtaaagttgaccccactctgtgtcactctaaactgtaccaatgctactgccagcaatagcagtataatagagggaatgaaaaattgctctttcaatataaccacagaattaagagataagagagagaaaaagaatgcacttttttataaacttgatatagtacaactagatggcaactctagtcagtatagattaataaattgtaatacctcagtcataacacaagcctgtccaaaggtctcttttgacccaattcctatacattattgtgctccagctggttatgcgattctaaagtgtaataataagacattcactggaacaggaccgtgtaataatgtcagcacagtacaatgtacacatggaattaagccagtggtttcaactcaactattgttaaatggtagcctagcagaaggagagataataattagatctgaaaatataacaaacactgccaaaacaataatagtacatctcaatgaatctgtaaagattgagtgtacgagacccaataataaaacaagaacaagtataagaataggaccaggacaagcattttatgcaacaggacaagtaataggagacataagagaagcatattgtaacattaatgaaagtaaatggaatgaaactttacaaagggtaagtaaaaaattaaaagaatacttccctcataagaatataacatttcaaccatcctcaggaggggacctagaaattacaacacatagctttaattgtggaggagaatttttctattgcaatacatcaagcctgtttaataggacatatatggctaatagtacagatatggctaatagtacagaaactaacagtacacgaaccatcacaatccactgcagaataaaacaaattataaacatgtggcaggaggtgggacgagcaatgtatgcccctcccattgcaggaaacataacatgtatatcaaatatcacaggactactattgacaagggatggaggaaaaaacaatacggagacattcagacctggaggaggaaatatgaaggacaattggagaagtgaattatataaatataaagtggtagaagttaagccattaggagtagcacccactaatgcaagaaggagagtggtggagagagaaaaaagagcagtgggaatgggagctgtgttccttgggttcttgggagcggcaggaagcactatgggcgcagcatcaataacgctgacggtacaggccagacaattattgtctggtatagtgcaacagcaaagcaatttgctgaaggctatagaggctcaacagcatatgttgaaactcacggtctggggcattaaacagctccaggcaagagtcctggccttggaaagatacctaaaggatcaacagctcctagggatgtggggctgctctggaaaactcatctgcaccactaatgtatattggaactctagttggagtaataaaacttatggtgatatttgggataacatgacctggatgcagtgggagagagaaattagcaattatacagaaataatatatgaattgcttgaagaatcacaaaaccagcaggaaaagaatgaacaagatttactagcattggacagatggaacagtctgtggaattggtttaacataacaaattggctgtggtatataaaaatattcataatgatagtaggaggcttgataggtttaagaataatttttgctgtgctttctttagtaaatagagttaggcagggatactcacctctgtcgttgcagacccttatcccaagcccgaggggaccagacaggcccggaggaatcgaagaagaaggtggagagcaagacagaaacagatcaacgcgattagtgagcggattcttagcgcttgtctgggacgacctgcggagcctgtgccttttcatctaccaccgattgagagacttcatattaattgcagcgagagcgggggaacttctgggacgcagcagtctcaagggactacggagaggatgggaagcccttaagtatctgggaagtcttgtgcagtattggggcctggaactaaaaaggagtgctattagtctattggataccctagcaatagcagtaggtgaaggaacagataggattctagaatttgtattaggaatttgtagagctatccgcaacatacctacaagaataagacagggctttgaaacagctttgctataa

SEQ ID NO: 118 - DNA, 2541 bp, Artificial Sequence
  Description of Artificial Sequence: Synthetic polynucleotide
atgagagtgatggggatacagaggaattatccacaatggtggatatggagcatgttaggcttttggatgctaatgatttgtaatgggatgtgggtcacagtctactatggggtacctgtgtggaaagaagcaaaaactactctattttgtgcatcagatgctaaagcatatgagaaagaagtgcataatgtctgggctacacatgcctgtgtacccacagaccccaatccacaagaaatggttttaaaaaatgtaacagaaaatttcaacatgtggaaaaatgacatggtggatcagatgcatgaagatgtaattagtttatgggatcaaagcctcaagccatgtgtaaagttgaccccactctgtgtcactctaaactgtaccaatgctactgccagcaatagcagtataatagagggaatgaaaaattgctctttcaatataaccacagaattaagagataagagagagaaaaagaatgcacttttttataaacttgatatagtacaactagatggcaactctagtcagtatagattaataaattgtaatacctcagtcataacacaagcctgtccaaaggtctcttttgacccaattcctatacattattgtgctccagctggttatgcgattctaaagtgtaataataagacattcactggaacaggaccgtgtaataatgtcagcacagtacaatgtacacatggaattaagccagtggtttcaactcaactattgttaaatggtagcctagcagaaggagagataataattagatctgaaaatataacaaacaatgccaaaacaataatagtacatctcaatgaatctgtaaagattgagtgtacgagacccaataataaaacaagaacaagtataagaataggaccaggacaagcattttatgcaacaggacaagtaataggagacataagagaagcatattgtaacattaatgaaagtaaatggaatgaaactttacaaagggtaagtaaaaaattaaaagaatacttccctcataagaatataacatttcaaccatcctcaggaggggacctagaaattacaacacatagctttaattgtggaggagaatttttctattgcaatacatcaagcctgtttaataggacatatatggctaatagtacagatatggctaatagtacagaaactaacagtacacgaaccatcacaatccactgcagaataaaacaaattataaacatgtggcaggaggtgggacgagcaatgtatgcccctcccattgcaggaaacataacatgtatatcaaatatcacaggactactattgacaagggatggaggaaaaaacaatacggagacattcagacctggaggaggaaatatgaaggacaattggagaagtgaattatataaatataaagtggtagaagttaagccattaggagtagcacccactaatgcaagaaggagagtggtggagagagaaaaaagagcagtgggaatgggagctgtgttccttgggttcttgggagcggcaggaagcactatgggcgcagcatcaataacgctgacggtacaggccagacaattattgtctggtatagtgcaacagcaaagcaatttgctgaaggctatagaggctcaacagcatatgttgaaactcacggtctggggcattaaacagctccaggcaagagtcctggccttggaaagatacctaaaggatcaacagctcctagggatgtggggctgctctggaaaactcatctgcaccactaatgtatattggaactctagttggagtaataaaacttatggtgatatttgggataacatgacctggatgcagtgggagagagaaattagcaattatacagaaataatatatgaattgcttgaagaatcacaaaaccagcaggaaaagaatgaacaagatttactagcattggacagatggaacagtctgtggaattggtttaacataacaaattggctgtggtatataaaaatattcataatgatagtaggaggcttgataggtttaagaataatttttgctgtgctttctttagtaaatagagttaggcagggatactcacctctgtcgttgcagacccttatcccaagcccgaggggaccagacaggcccggaggaatcgaagaagaaggtggagagcaagacagaaacagatcaacgcgattagtgagcggattcttagcgcttgtctgggacgacctgcggagcctgtgccttttcatctaccaccgattgagagacttcatattaattgcagcgagagcgggggaacttctgggacgcagcagtctcaagggactacggagaggatgggaagcccttaagtatctgggaagtcttgtgcagtattggggcctggaactaaaaaggagtgctattagtctattggataccctagcaatagcagtaggtgaaggaacagataggattctagaatttgtattaggaatttgtagagctatccgcaacatacctacaagaataagacagggctttgaaacagctttgctataa

SEQ ID NO: 119 - protein, 847 aa, Artificial Sequence
  Description of Artificial Sequence: Synthetic polypeptide
MRVMGIQRNYPQWWIWSMLGFWMLMICNGMWVTVYYGVPVWKEAKTTLFCASDAKAYEKEVHNVWATHACVPTDPNPQEMVLKNVTENFNMWKNDMVDQMHEDVISLWDQSLKPCVKLTPLCVTLNCTNATASNSSIIEGMKNCSFNITTELRDKREKKNALFYKLDIVQLDGNSSQYRLINCNTSVITQACPKVSFDPIPIHYCAPAGYAILKCNNKTFTGTGPCNNVSTVQCTHGIKPVVSTQLLLNGSLAEGEIIIRSENITKNVKTIIVHLNESVKIECTRPNNKTRTSIRIGPGQAFYATGQVIGDIREAYCNINESKWNETLQRVSKKLKEYFPHKNITFQPSSGGDLEITTHSFNCGGEFFYCNTSSLFNRTYMANSTDMANSTETNSTRTITIHCRIKQIINMWQEVGRAMYAPPIAGNITCISNITGLLLTRDGGKNNTETFRPGGGNMKDNWRSELYKYKVVEVKPLGVAPTNARRRVVEREKRAVGMGAVFLGFLGAAGSTMGAASITLTVQARQLLSGIVQQQSNLLKAIEAQQHMLKLTVWGIKQLQARVLALERYLKDQQLLGMWGCSGKLICTTNVYWNSSWSNKTYGDIWDNMTWMQWEREISNYTEIIYELLEESQNQQEKNEQDLLALDRWNSLWNWFNITNWLWYIKIFIMIVGGLIGLRIIFAVLSLVNRVRQGYSPLSLQTLIPSPRGPDRPGGIEEEGGEQDRNRSTRLVSGFLALVWDDLRSLCLFIYHRLRDFILIAARAGELLGRSSLKGLRRGWEALKYLGSLVQYWGLELKRSAISLLDTLAIAVGEGTDRILEFVLGICRAIRNIPTRIRQGFETALLZ

SEQ ID NO: 120 - protein, 847 aa, Artificial Sequence
  Description of Artificial Sequence: Synthetic polypeptide
MRVMGIQRNYPQWWIWSMLGFWMLMICNGMWVTVYYGVPVWKEAKTTLFCASDAKAYEKEVHNVWATHACVPTDPNPQEMVLKNVTENFNMWKNDMVDQMHEDVISLWDQSLKPCVKLTPLCVTLNCTNATASNSSIIEGMKNCSFNITTELRDKREKKNALFYKLDIVQLDGNSSQYRLINCNTSVITQACPKVSFDPIPIHYCAPAGYAILKCNNKTFTGTGPCNNVSTVQCTHGIKPVVSTQLLLNGSLAEGEIIIRSENITNNDKTIIVHLNESVKIECTRPNNKTRTSIRIGPGQAFYATGQVIGDIREAYCNINESKWNETLQRVSKKLKEYFPHKNITFQPSSGGDLEITTHSFNCGGEFFYCNTSSLFNRTYMANSTDMANSTETNSTRTITIHCRIKQIINMWQEVGRAMYAPPIAGNITCISNITGLLLTRDGGKNNTETFRPGGGNMKDNWRSELYKYKVVEVKPLGVAPTNARRRVVEREKRAVGMGAVFLGFLGAAGSTMGAASITLTVQARQLLSGIVQQQSNLLKAIEAQQHMLKLTVWGIKQLQARVLALERYLKDQQLLGMWGCSGKLICTTNVYWNSSWSNKTYGDIWDNMTWMQWEREISNYTEIIYELLEESQNQQEKNEQDLLALDRWNSLWNWFNITNWLWYIKIFIMIVGGLIGLRIIFAVLSLVNRVRQGYSPLSLQTLIPSPRGPDRPGGIEEEGGEQDRNRSTRLVSGFLALVWDDLRSLCLFIYHRLRDFILIAARAGELLGRSSLKGLRRGWEALKYLGSLVQYWGLELKRSAISLLDTLAIAVGEGTDRILEFVLGICRAIRNIPTRIRQGFETALLZ

SEQ ID NO: 121 - protein, 847 aa, Artificial Sequence
  Description of Artificial Sequence: Synthetic polypeptide
MRVMGIQRNYPQWWIWSMLGFWMLMICNGMWVTVYYGVPVWKEAKTTLFCASDAKAYEKEVHNVWATHACVPTDPNPQEMVLKNVTENFNMWKNDMVDQMHEDVISLWDQSLKPCVKLTPLCVTLNCTNATASNSSIIEGMKNCSFNITTELRDKREKKNALFYKLDIVQLDGNSSQYRLINCNTSVITQACPKVSFDPIPIHYCAPAGYAILKCNNKTFTGTGPCNNVSTVQCTHGIKPVVSTQLLLNGSLAEGEIIIRSENITNNGKTIIVHLNESVKIECTRPNNKTRTSIRIGPGQAFYATGQVIGDIREAYCNINESKWNETLQRVSKKLKEYFPHKNITFQPSSGGDLEITTHSFNCGGEFFYCNTSSLFNRTYMANSTDMANSTETNSTRTITIHCRIKQIINMWQEVGRAMYAPPIAGNITCISNITGLLLTRDGGKNNTETFRPGGGNMKDNWRSELYKYKVVEVKPLGVAPTNARRRVVEREKRAVGMGAVFLGFLGAAGSTMGAASITLTVQARQLLSGIVQQQSNLLKAIEAQQHMLKLTVWGIKQLQARVLALERYLKDQQLLGMWGCSGKLICTTNVYWNSSWSNKTYGDIWDNMTWMQWEREISNYTEIIYELLEESQNQQEKNEQDLLALDRWNSLWNWFNITNWLWYIKIFIMIVGGLIGLRIIFAVLSLVNRVRQGYSPLSLQTLIPSPRGPDRPGGIEEEGGEQDRNRSTRLVSGFLALVWDDLRSLCLFIYHRLRDFILIAARAGELLGRSSLKGLRRGWEALKYLGSLVQYWGLELKRSAISLLDTLAIAVGEGTDRILEFVLGICRAIRNIPTRIRQGFETALLZ

SEQ ID NO: 122 - protein, 847 aa, Artificial Sequence
  Description of Artificial Sequence: Synthetic polypeptide
MRVMGIQRNYPQWWIWSMLGFWMLMICNGMWVTVYYGVPVWKEAKTTLFCASDAKAYEKEVHNVWATHACVPTDPNPQEMVLKNVTENFNMWKNDMVDQMHEDVISLWDQSLKPCVKLTPLCVTLNCTNATASNSSIIEGMKNCSFNITTELRDKREKKNALFYKLDIVQLDGNSSQYRLINCNTSVITQACPKVSFDPIPIHYCAPAGYAILKCNNKTFTGTGPCNNVSTVQCTHGIKPVVSTQLLLNGSLAEGEIIIRSENITDNGKTIIVHLNESVKIECTRPNNKTRTSIRIGPGQAFYATGQVIGDIREAYCNINESKWNETLQRVSKKLKEYFPHKNITFQPSSGGDLEITTHSFNCGGEFFYCNTSSLFNRTYMANSTDMANSTETNSTRTITIHCRIKQIINMWQEVGRAMYAPPIAGNITCISNITGLLLTRDGGKNNTETFRPGGGNMKDNWRSELYKYKVVEVKPLGVAPTNARRRVVEREKRAVGMGAVFLGFLGAAGSTMGAASITLTVQARQLLSGIVQQQSNLLKAIEAQQHMLKLTVWGIKQLQARVLALERYLKDQQLLGMWGCSGKLICTTNVYWNSSWSNKTYGDIWDNMTWMQWEREISNYTEIIYELLEESQNQQEKNEQDLLALDRWNSLWNWFNITNWLWYIKIFIMIVGGLIGLRIIFAVLSLVNRVRQGYSPLSLQTLIPSPRGPDRPGGIEEEGGEQDRNRSTRLVSGFLALVWDDLRSLCLFIYHRLRDFILIAARAGELLGRSSLKGLRRGWEALKYLGSLVQYWGLELKRSAISLLDTLAIAVGEGTDRILEFVLGICRAIRNIPTRIRQGFETALLZ

SEQ ID NO: 123 - protein, 847 aa, Artificial Sequence
  Description of Artificial Sequence: Synthetic polypeptide
MRVMGIQRNYPQWWIWSMLGFWMLMICNGMWVTVYYGVPVWKEAKTTLFCASDAKAYEKEVHNVWATHACVPTDPNPQEMVLKNVTENFNMWKNDMVDQMHEDVISLWDQSLKPCVKLTPLCVTLNCTNATASNSSIIEGMKNCSFNITTELRDKREKKNALFYKLDIVQLDGNSSQYRLINCNTSVITQACPKVSFDPIPIHYCAPAGYAILKCNNKTFTGTGPCNNVSTVQCTHGIKPVVSTQLLLNGSLAEGEIIIRSKNITDNGKTIIVHLNESVKIECTRPNNKTRTSIRIGPGQAFYATGQVIGDIREAYCNINESKWNETLQRVSKKLKEYFPHKNITFQPSSGGDLEITTHSFNCGGEFFYCNTSSLFNRTYMANSTDMANSTETNSTRTITIHCRIKQIINMWQEVGRAMYAPPIAGNITCISNITGLLLTRDGGKNNTETFRPGGGNMKDNWRSELYKYKVVEVKPLGVAPTNARRRVVEREKRAVGMGAVFLGFLGAAGSTMGAASITLTVQARQLLSGIVQQQSNLLKAIEAQQHMLKLTVWGIKQLQARVLALERYLKDQQLLGMWGCSGKLICTTNVYWNSSWSNKTYGDIWDNMTWMQWEREISNYTEIIYELLEESQNQQEKNEQDLLALDRWNSLWNWFNITNWLWYIKIFIMIVGGLIGLRIIFAVLSLVNRVRQGYSPLSLQTLIPSPRGPDRPGGIEEEGGEQDRNRSTRLVSGFLALVWDDLRSLCLFIYHRLRDFILIAARAGELLGRSSLKGLRRGWEALKYLGSLVQYWGLELKRSAISLLDTLAIAVGEGTDRILEFVLGICRAIRNIPTRIRQGFETALLZ

SEQ ID NO: 124 - protein, 847 aa, Artificial Sequence
  Description of Artificial Sequence: Synthetic polypeptide
MRVMGIQRNYPQWWIWSMLGFWMLMICNGMWVTVYYGVPVWKEAKTTLFCASDAKAYEKEVHNVWATHACVPTDPNPQEMVLKNVTENFNMWKNDMVDQMHEDVISLWDQSLKPCVKLTPLCVTLNCTNATASNSSIIEGMKNCSFNITTELRDKREKKNALFYKLDIVQLDGNSSQYRLINCNTSVITQACPKVSFDPIPIHYCAPAGYAILKCNNKTFTGTGPCNNVSTVQCTHGIKPVVSTQLLLNGSLAEGEIIIRSKNITDNSKTIIVHLNESVKIECTRPNNKTRTSIRIGPGQAFYATGQVIGDIREAYCNINESKWNETLQRVSKKLKEYFPHKNITFQPSSGGDLEITTHSFNCGGEFFYCNTSSLFNRTYMANSTDMANSTETNSTRTITIHCRIKQIINMWQEVGRAMYAPPIAGNITCISNITGLLLTRDGGKNNTETFRPGGGNMKDNWRSELYKYKVVEVKPLGVAPTNARRRVVEREKRAVGMGAVFLGFLGAAGSTMGAASITLTVQARQLLSGIVQQQSNLLKAIEAQQHMLKLTVWGIKQLQARVLALERYLKDQQLLGMWGCSGKLICTTNVYWNSSWSNKTYGDIWDNMTWMQWEREISNYTEIIYELLEESQNQQEKNEQDLLALDRWNSLWNWFNITNWLWYIKIFIMIVGGLIGLRIIFAVLSLVNRVRQGYSPLSLQTLIPSPRGPDRPGGIEEEGGEQDRNRSTRLVSGFLALVWDDLRSLCLFIYHRLRDFILIAARAGELLGRSSLKGLRRGWEALKYLGSLVQYWGLELKRSAISLLDTLAIAVGEGTDRILEFVLGICRAIRNIPTRIRQGFETALLZ

SEQ ID NO: 125 - protein, 847 aa, Artificial Sequence
  Description of Artificial Sequence: Synthetic polypeptide
MRVMGIQRNYPQWWIWSMLGFWMLMICNGMWVTVYYGVPVWKEAKTTLFCASDAKAYEKEVHNVWATHACVPTDPNPQEMVLKNVTENFNMWKNDMVDQMHEDVISLWDQSLKPCVKLTPLCVTLNCTNATASNSSIIEGMKNCSFNITTELRDKREKKNALFYKLDIVQLDGNSSQYRLINCNTSVITQACPKVSFDPIPIHYCAPAGYAILKCNNKTFTGTGPCNNVSTVQCTHGIKPVVSTQLLLNGSLAEGEIIIRSENITNSGKTIIVHLNESVKIECTRPNNKTRTSIRIGPGQAFYATGQVIGDIREAYCNINESKWNETLQRVSKKLKEYFPHKNITFQPSSGGDLEITTHSFNCGGEFFYCNTSSLFNRTYMANSTDMANSTETNSTRTITIHCRIKQIINMWQEVGRAMYAPPIAGNITCISNITGLLLTRDGGKNNTETFRPGGGNMKDNWRSELYKYKVVEVKPLGVAPTNARRRVVEREKRAVGMGAVFLGFLGAAGSTMGAASITLTVQARQLLSGIVQQQSNLLKAIEAQQHMLKLTVWGIKQLQARVLALERYLKDQQLLGMWGCSGKLICTTNVYWNSSWSNKTYGDIWDNMTWMQWEREISNYTEIIYELLEESQNQQEKNEQDLLALDRWNSLWNWFNITNWLWYIKIFIMIVGGLIGLRIIFAVLSLVNRVRQGYSPLSLQTLIPSPRGPDRPGGIEEEGGEQDRNRSTRLVSGFLALVWDDLRSLCLFIYHRLRDFILIAARAGELLGRSSLKGLRRGWEALKYLGSLVQYWGLELKRSAISLLDTLAIAVGEGTDRILEFVLGICRAIRNIPTRIRQGFETALLZ

SEQ ID NO: 126 - protein, 847 aa, Artificial Sequence
  Description of Artificial Sequence: Synthetic polypeptide
MRVMGIQRNYPQWWIWSMLGFWMLMICNGMWVTVYYGVPVWKEAKTTLFCASDAKAYEKEVHNVWATHACVPTDPNPQEMVLKNVTENFNMWKNDMVDQMHEDVISLWDQSLKPCVKLTPLCVTLNCTNATASNSSIIEGMKNCSFNITTELRDKREKKNALFYKLDIVQLDGNSSQYRLINCNTSVITQACPKVSFDPIPIHYCAPAGYAILKCNNKTFTGTGPCNNVSTVQCTHGIKPVVSTQLLLNGSLAEGEIIIRSENITNSAKTIIVHLNESVKIECTRPNNKTRTSIRIGPGQAFYATGQVIGDIREAYCNINESKWNETLQRVSKKLKEYFPHKNITFQPSSGGDLEITTHSFNCGGEFFYCNTSSLFNRTYMANSTDMANSTETNSTRTITIHCRIKQIINMWQEVGRAMYAPPIAGNITCISNITGLLLTRDGGKNNTETFRPGGGNMKDNWRSELYKYKVVEVKPLGVAPTNARRRVVEREKRAVGMGAVFLGFLGAAGSTMGAASITLTVQARQLLSGIVQQQSNLLKAIEAQQHMLKLTVWGIKQLQARVLALERYLKDQQLLGMWGCSGKLICTTNVYWNSSWSNKTYGDIWDNMTWMQWEREISNYTEIIYELLEESQNQQEKNEQDLLALDRWNSLWNWFNITNWLWYIKIFIMIVGGLIGLRIIFAVLSLVNRVRQGYSPLSLQTLIPSPRGPDRPGGIEEEGGEQDRNRSTRLVSGFLALVWDDLRSLCLFIYHRLRDFILIAARAGELLGRSSLKGLRRGWEALKYLGSLVQYWGLELKRSAISLLDTLAIAVGEGTDRILEFVLGICRAIRNIPTRIRQGFETALLZ

SEQ ID NO: 127 - protein, 847 aa, Artificial Sequence
  Description of Artificial Sequence: Synthetic polypeptide
MRVMGIQRNYPQWWIWSMLGFWMLMICNGMWVTVYYGVPVWKEAKTTLFCASDAKAYEKEVHNVWATHACVPTDPNPQEMVLKNVTENFNMWKNDMVDQMHEDVISLWDQSLKPCVKLTPLCVTLNCTNATASNSSIIEGMKNCSFNITTELRDKREKKNALFYKLDIVQLDGNSSQYRLINCNTSVITQACPKVSFDPIPIHYCAPAGYAILKCNNKTFTGTGPCNNVSTVQCTHGIKPVVSTQLLLNGSLAEGEIIIRSENITNTAKTIIVHLNESVKIECTRPNNKTRTSIRIGPGQAFYATGQVIGDIREAYCNINESKWNETLQRVSKKLKEYFPHKNITFQPSSGGDLEITTHSFNCGGEFFYCNTSSLFNRTYMANSTDMANSTETNSTRTITIHCRIKQIINMWQEVGRAMYAPPIAGNITCISNITGLLLTRDGGKNNTETFRPGGGNMKDNWRSELYKYKVVEVKPLGVAPTNARRRVVEREKRAVGMGAVFLGFLGAAGSTMGAASITLTVQARQLLSGIVQQQSNLLKAIEAQQHMLKLTVWGIKQLQARVLALERYLKDQQLLGMWGCSGKLICTTNVYWNSSWSNKTYGDIWDNMTWMQWEREISNYTEIIYELLEESQNQQEKNEQDLLALDRWNSLWNWFNITNWLWYIKIFIMIVGGLIGLRIIFAVLSLVNRVRQGYSPLSLQTLIPSPRGPDRPGGIEEEGGEQDRNRSTRLVSGFLALVWDDLRSLCLFIYHRLRDFILIAARAGELLGRSSLKGLRRGWEALKYLGSLVQYWGLELKRSAISLLDTLAIAVGEGTDRILEFVLGICRAIRNIPTRIRQGFETALLZ

SEQ ID NO: 128 - protein, 847 aa, Artificial Sequence
  Description of Artificial Sequence: Synthetic polypeptide
MRVMGIQRNYPQWWIWSMLGFWMLMICNGMWVTVYYGVPVWKEAKTTLFCASDAKAYEKEVHNVWATHACVPTDPNPQEMVLKNVTENFNMWKNDMVDQMHEDVISLWDQSLKPCVKLTPLCVTLNCTNATASNSSIIEGMKNCSFNITTELRDKREKKNALFYKLDIVQLDGNSSQYRLINCNTSVITQACPKVSFDPIPIHYCAPAGYAILKCNNKTFTGTGPCNNVSTVQCTHGIKPVVSTQLLLNGSLAEGEIIIRSENITNNAKTIIVHLNESVKIECTRPNNKTRTSIRIGPGQAFYATGQVIGDIREAYCNINESKWNETLQRVSKKLKEYFPHKNITFQPSSGGDLEITTHSFNCGGEFFYCNTSSLFNRTYMANSTDMANSTETNSTRTITIHCRIKQIINMWQEVGRAMYAPPIAGNITCISNITGLLLTRDGGKNNTETFRPGGGNMKDNWRSELYKYKVVEVKPLGVAPTNARRRVVEREKRAVGMGAVFLGFLGAAGSTMGAASITLTVQARQLLSGIVQQQSNLLKAIEAQQHMLKLTVWGIKQLQARVLALERYLKDQQLLGMWGCSGKLICTTNVYWNSSWSNKTYGDIWDNMTWMQWEREISNYTEIIYELLEESQNQQEKNEQDLLALDRWNSLWNWFNITNWLWYIKIFIMIVGGLIGLRIIFAVLSLVNRVRQGYSPLSLQTLIPSPRGPDRPGGIEEEGGEQDRNRSTRLVSGFLALVWDDLRSLCLFIYHRLRDFILIAARAGELLGRSSLKGLRRGWEALKYLGSLVQYWGLELKRSAISLLDTLAIAVGEGTDRILEFVLGICRAIRNIPTRIRQGFETALLZ

SEQ ID NO: 129 - protein, 486 aa, Artificial Sequence
  Description of Artificial Sequence: Synthetic polypeptide
MRVMGIQRNYPQWWIWSMLGFWMLMICNGVPVWKEAKTTLFCASDAKAYEKEVHNVWATHACVPTDPNPQEMVLKNVTENFNMWKNDMVDQMHEDVISLWDQSLKPCVKLTPLCVTLNCTNATASNSSIIEGMKNCSFNITTELRDKREKKNALFYKLDIVQLDGNSSQYRLINCNTSVITQACPKVSFDPIPIHYCAPAGYAILKCNNKTFTGTGPCNNVSTVQCTHGIKPVVSTQLLLNGSLAEGEIIIRSENITKNVKTIIVHLNESVKIECTRPNNKTRTSIRIGPGQAFYATGQVIGDIREAYCNINESKWNETLQRVSKKLKEYFPHKNITFQPSSGGDLEITTHSFNCGGEFFYCNTSSLFNRTYMANSTDMANSTETNSTRTITIHCRIKQIINMWQEVGRAMYAPPIAGNITCISNITGLLLTRDGGKNNTETFRPGGGNMKDNWRSELYKYKVVEVKPLGVAPTNARERVVEREKE

SEQ ID NO: 130 - protein, 486 aa, Artificial Sequence
  Description of Artificial Sequence: Synthetic polypeptide
MRVMGIQRNYPQWWIWSMLGFWMLMICNGVPVWKEAKTTLFCASDAKAYEKEVHNVWATHACVPTDPNPQEMVLKNVTENFNMWKNDMVDQMHEDVISLWDQSLKPCVKLTPLCVTLNCTNATASNSSIIEGMKNCSFNITTELRDKREKKNALFYKLDIVQLDGNSSQYRLINCNTSVITQACPKVSFDPIPIHYCAPAGYAILKCNNKTFTGTGPCNNVSTVQCTHGIKPVVSTQLLLNGSLAEGEIIIRSENITNNAKTIIVHLNESVKIECTRPNNKTRTSIRIGPGQAFYATGQVIGDIREAYCNINESKWNETLQRVSKKLKEYFPHKNITFQPSSGGDLEITTHSFNCGGEFFYCNTSSLFNRTYMANSTDMANSTETNSTRTITIHCRIKQIINMWQEVGRAMYAPPIAGNITCISNITGLLLTRDGGKNNTETFRPGGGNMKDNWRSELYKYKVVEVKPLGVAPTNARERVVEREKE

SEQ ID NO: 131 - protein, 486 aa, Artificial Sequence
  Description of Artificial Sequence: Synthetic polypeptide
MRVMGIQRNYPQWWIWSMLGFWMLMICNGVPVWKEAKTTLFCASDAKAYEKEVHNVWATHACVPTDPNPQEMVLKNVTENFNMWKNDMVDQMHEDVISLWDQSLKPCVKLTPLCVTLNCTNATASNSSIIEGMKNCSFNITTELRDKREKKNALFYKLDIVQLDGNSSQYRLINCNTSVITQACPKVSFDPIPIHYCAPAGYAILKCNNKTFTGTGPCNNVSTVQCTHGIKPVVSTQLLLNGSLAEGEIIIRSKNITDNSKTIIVHLNESVKIECTRPNNKTRTSIRIGPGQAFYATGQVIGDIREAYCNINESKWNETLQRVSKKLKEYFPHKNITFQPSSGGDLEITTHSFNCGGEFFYCNTSSLFNRTYMANSTDMANSTETNSTRTITIHCRIKQIINMWQEVGRAMYAPPIAGNITCISNITGLLLTRDGGKNNTETFRPGGGNMKDNWRSELYKYKVVEVKPLGVAPTNARERVVEREKE

SEQ ID NO: 132 - protein, 486 aa, Artificial Sequence
  Description of Artificial Sequence: Synthetic polypeptide
MRVMGIQRNYPQWWIWSMLGFWMLMICNGVPVWKEAKTTLFCASDAKAYEKEVHNVWATHACVPTDPNPQEMVLKNVTENFNMWKNDMVDQMHEDVISLWDQSLKPCVKLTPLCVTLNCTNATASNSSIIEGMKNCSFNITTELRDKREKKNALFYKLDIVQLDGNSSQYRLINCNTSVITQACPKVSFDPIPIHYCAPAGYAILKCNNKTFTGTGPCNNVSTVQCTHGIKPVVSTQLLLNGSLAEGEIIIRSENITNSAKTIIVHLNESVKIECTRPNNKTRTSIRIGPGQAFYATGQVIGDIREAYCNINESKWNETLQRVSKKLKEYFPHKNITFQPSSGGDLEITTHSFNCGGEFFYCNTSSLFNRTYMANSTDMANSTETNSTRTITIHCRIKQIINMWQEVGRAMYAPPIAGNITCISNITGLLLTRDGGKNNTETFRPGGGNMKDNWRSELYKYKVVEVKPLGVAPTNARERVVEREKE

SEQ ID NO: 133 - protein, 486 aa, Artificial Sequence
  Description of Artificial Sequence: Synthetic polypeptide
MRVMGIQRNYPQWWIWSMLGFWMLMICNGVPVWKEAKTTLFCASDAKAYEKEVHNVWATHACVPTDPNPQEMVLKNVTENFNMWKNDMVDQMHEDVISLWDQSLKPCVKLTPLCVTLNCTNATASNSSIIEGMKNCSFNITTELRDKREKKNALFYKLDIVQLDGNSSQYRLINCNTSVITQACPKVSFDPIPIHYCAPAGYAILKCNNKTFTGTGPCNNVSTVQCTHGIKPVVSTQLLLNGSLAEGEIIIRSKNITDNGKTIIVHLNESVKIECTRPNNKTRTSIRIGPGQAFYATGQVIGDIREAYCNINESKWNETLQRVSKKLKEYFPHKNITFQPSSGGDLEITTHSFNCGGEFFYCNTSSLFNRTYMANSTDMANSTETNSTRTITIHCRIKQIINMWQEVGRAMYAPPIAGNITCISNITGLLLTRDGGKNNTETFRPGGGNMKDNWRSELYKYKVVEVKPLGVAPTNARERVVEREKE

SEQ ID NO: 134 - protein, 486 aa, Artificial Sequence
  Description of Artificial Sequence: Synthetic polypeptide
MRVMGIQRNYPQWWIWSMLGFWMLMICNGVPVWKEAKTTLFCASDAKAYEKEVHNVWATHACVPTDPNPQEMVLKNVTENFNMWKNDMVDQMHEDVISLWDQSLKPCVKLTPLCVTLNCTNATASNSSIIEGMKNCSFNITTELRDKREKKNALFYKLDIVQLDGNSSQYRLINCNTSVITQACPKVSFDPIPIHYCAPAGYAILKCNNKTFTGTGPCNNVSTVQCTHGIKPVVSTQLLLNGSLAEGEIIIRSENITNNGKTIIVHLNESVKIECTRPNNKTRTSIRIGPGQAFYATGQVIGDIREAYCNINESKWNETLQRVSKKLKEYFPHKNITFQPSSGGDLEITTHSFNCGGEFFYCNTSSLFNRTYMANSTDMANSTETNSTRTITIHCRIKQIINMWQEVGRAMYAPPIAGNITCISNITGLLLTRDGGKNNTETFRPGGGNMKDNWRSELYKYKVVEVKPLGVAPTNARERVVEREKE

SEQ ID NO: 135 - protein, 486 aa, Artificial Sequence
  Description of Artificial Sequence: Synthetic polypeptide
MRVMGIQRNYPQWWIWSMLGFWMLMICNGVPVWKEAKTTLFCASDAKAYEKEVHNVWATHACVPTDPNPQEMVLKNVTENFNMWKNDMVDQMHEDVISLWDQSLKPCVKLTPLCVTLNCTNATASNSSIIEGMKNCSFNITTELRDKREKKNALFYKLDIVQLDGNSSQYRLINCNTSVITQACPKVSFDPIPIHYCAPAGYAILKCNNKTFTGTGPCNNVSTVQCTHGIKPVVSTQLLLNGSLAEGEIIIRSENITDNGKTIIVHLNESVKIECTRPNNKTRTSIRIGPGQAFYATGQVIGDIREAYCNINESKWNETLQRVSKKLKEYFPHKNITFQPSSGGDLEITTHSFNCGGEFFYCNTSSLFNRTYMANSTDMANSTETNSTRTITIHCRIKQIINMWQEVGRAMYAPPIAGNITCISNITGLLLTRDGGKNNTETFRPGGGNMKDNWRSELYKYKVVEVKPLGVAPTNARERVVEREKE

SEQ ID NO: 136 - protein, 486 aa, Artificial Sequence
  Description of Artificial Sequence: Synthetic polypeptide
MRVMGIQRNYPQWWIWSMLGFWMLMICNGVPVWKEAKTTLFCASDAKAYEKEVHNVWATHACVPTDPNPQEMVLKNVTENFNMWKNDMVDQMHEDVISLWDQSLKPCVKLTPLCVTLNCTNATASNSSIIEGMKNCSFNITTELRDKREKKNALFYKLDIVQLDGNSSQYRLINCNTSVITQACPKVSFDPIPIHYCAPAGYAILKCNNKTFTGTGPCNNVSTVQCTHGIKPVVSTQLLLNGSLAEGEIIIRSENITNNDKTIIVHLNESVKIECTRPNNKTRTSIRIGPGQAFYATGQVIGDIREAYCNINESKWNETLQRVSKKLKEYFPHKNITFQPSSGGDLEITTHSFNCGGEFFYCNTSSLFNRTYMANSTDMANSTETNSTRTITIHCRIKQIINMWQEVGRAMYAPPIAGNITCISNITGLLLTRDGGKNNTETFRPGGGNMKDNWRSELYKYKVVEVKPLGVAPTNARERVVEREKE

SEQ ID NO: 137 - protein, 486 aa, Artificial Sequence
  Description of Artificial Sequence: Synthetic polypeptide
MRVMGIQRNYPQWWIWSMLGFWMLMICNGVPVWKEAKTTLFCASDAKAYEKEVHNVWATHACVPTDPNPQEMVLKNVTENFNMWKNDMVDQMHEDVISLWDQSLKPCVKLTPLCVTLNCTNATASNSSIIEGMKNCSFNITTELRDKREKKNALFYKLDIVQLDGNSSQYRLINCNTSVITQACPKVSFDPIPIHYCAPAGYAILKCNNKTFTGTGPCNNVSTVQCTHGIKPVVSTQLLLNGSLAEGEIIIRSENITNSGKTIIVHLNESVKIECTRPNNKTRTSIRIGPGQAFYATGQVIGDIREAYCNINESKWNETLQRVSKKLKEYFPHKNITFQPSSGGDLEITTHSFNCGGEFFYCNTSSLFNRTYMANSTDMANSTETNSTRTITIHCRIKQIINMWQEVGRAMYAPPIAGNITCISNITGLLLTRDGGKNNTETFRPGGGNMKDNWRSELYKYKVVEVKPLGVAPTNARERVVEREKE

SEQ ID NO: 138 - protein, 486 aa, Artificial Sequence
  Description of Artificial Sequence: Synthetic polypeptide
MRVMGIQRNYPQWWIWSMLGFWMLMICNGVPVWKEAKTTLFCASDAKAYEKEVHNVWATHACVPTDPNPQEMVLKNVTENFNMWKNDMVDQMHEDVISLWDQSLKPCVKLTPLCVTLNCTNATASNSSIIEGMKNCSFNITTELRDKREKKNALFYKLDIVQLDGNSSQYRLINCNTSVITQACPKVSFDPIPIHYCAPAGYAILKCNNKTFTGTGPCNNVSTVQCTHGIKPVVSTQLLLNGSLAEGEIIIRSENITNTAKTIIVHLNESVKIECTRPNNKTRTSIRIGPGQAFYATGQVIGDIREAYCNINESKWNETLQRVSKKLKEYFPHKNITFQPSSGGDLEITTHSFNCGGEFFYCNTSSLFNRTYMANSTDMANSTETNSTRTITIHCRIKQIINMWQEVGRAMYAPPIAGNITCISNITGLLLTRDGGKNNTETFRPGGGNMKDNWRSELYKYKVVEVKPLGVAPTNARERVVEREKE

SEQ ID NO: 139 - protein, 486 aa, Artificial Sequence
  Description of Artificial Sequence: Synthetic polypeptide
MRVMGIQRNYPQWWIWSMLGFWMLMICNGVPVWKEAKTTLFCASDAKAYEKEVHNVWATHACVPTDPNPQEMVLKNVTENFNMWKNDMVDQMHEDVISLWDQSLKPCVKLTPLCVTLNCTNATASNSSIIEGMKNCSFNITTELRDKREKKNALFYKLDIVQLDGNSSQYRLINCNTSVITQACPKVSFDPIPIHYCAPAGYAILKCNNKTFTGTGPCNNVSTVQCTHGIKPVVSTQLLLNGSLAEGEIIIRSENITNNVKTIIVHLNESVKIECTRPNNKTRTSIRIGPGQAFYATGQVIGDIREAYCNINESKWNETLQRVSKKLKEYFPHKNITFQPSSGGDLEITTHSFNCGGEFFYCNTSSLFNRTYMANSTDMANSTETNSTRTITIHCRIKQIINMWQEVGRAMYAPPIAGNITCISNITGLLLTRDGGKNNTETFRPGGGNMKDNWRSELYKYKVVEVKPLGVAPTNARERVVEREKE

SEQ ID NO: 140 - DNA, 9699 bp, Human immunodeficiency virus 1
tggaagggttagtttactccaagaaaagacaagagatccttgatttgtgggtctataacacacaaggcttcttccctgattggcaaaactacacaccgggaccaggggtcagatatccactgacctttggatggtgcttcaagctagtgccagtcgatccagaggaagtagaagaggccaataaaggagaaaacaactgcttactacaccctatgagccagcatggaatggatgatgaggacagagaagtactaaagtggaagtttgacagtcagctagcacgcagacacatggcccgcgagctacatccggagtggtacaaagactgctgacacagaagggactttccgctgggactttccactggggcgttccagggggagtggtctgggcgggactgggagtggccaaccctcagatgctgcatataagcagctgcttttcgcctgtactgggtctctctaggtagaccagatctgagcccgggagctctctgactacctagggaacccactgcttaagcctcaataaaagcttgccttgagtgctctaagtagtgtgtgcccgtctgttgtgtgactctggtaactagagatccctcagaccctttgtggtagtgtggaaaatctctagcagtggcgcccgaacagggacttgaaagcgaaagtagaaccagaggagatctctcgacgcaggactcggcttgctgaagtgcactcggcaagaggcgagagcggcggctggtgagtacgccaaattttatttgactagcggaggctagaaggagagagatgggtgcgagagcgtcaatattaagagggggaaaattagataaatgggaaagaattaggttaaggccagggggaaagaaatgctatatgataaaacacttagtatgggcaagcagggagttggaaagatttgcacttaatcctggcctcttagaaacatcagaaggctgtagacaaataataaagcagctacaaccatctcttcagacaggaacagaggaacttagatcattatataacacagtagtaactctctattgtgtacatgaagagatagaagtacgagacaccaaagaagccttagacaaactagaggaagaacaaaacaaatgtcagcaaaaagcacagcaagcagaggcggctgacaaaggaaaggtcagccaaaattatcctatagtacagaatctccaagggcaaatggtacaccagcccctatcacctagaactttgaatgcatgggtgaaagtaatagaagagaagggttttaacccagaggtaatacccatgttttcagcattatcagaaggagccaccccacaagacttaaacaccatgttaaatacagtagggggacatcaagcagccatgcaaatgttgaaagataccatcaatgaggaggctgcagaatgggatagattacatccagtccatgcagggcctattgcaccaggccaaatgagagaaccaaggggaagtgatatagcaggaacaactagcaaccttcaggaacaaatagcatggatgacagctaacccacctatcccagtgggagaattgtataaaagatggataattctgggattaaataaaatagtaagaatgtatagccctgtcagcattttggacataaaacaagggccaaaagaaccctttagagactatgtagaccggttctttaaaactttgagagctgaacaagctacacaagatgtaaaaaattggatgacagacaccttgttgacccaaaatgcgaacccagattgtaagaccattttaagagcattaggaccaggggctacattagaagaaatgatgacagcatgccaaggagtgggaggacctagccacaaagcaagagtgctagctgaagcaatgagccaagtaaatcatccaaacataatgatgcagagaaacaattttaaaggaccaaaaagaattgttaaatgcttcaactgtggcaaggaagggcacatagccagaaattgcagggcacctaggaaaaggggctgttggaaatgtggaaaggaaggacaccaaatgaaagactgtactgaaaggcaggctaattttttagggaaaatttggccttcccacaaggggaggccagggaatttcatccagaacaggctagagcccacagccccaccagcagagagtttcaggttcgaggagacaacccccagtctgaagcaggagccgaaggagagggaaccacccttaacttccctcaaatcactctttggcagcgaccccttgtctcaataagagtagggggccagataaaggaggctctcttagacacaggagcagatgatacagtattagaagaaataaatttgccagggaaatggaaaccaaaaatgataggaggaattggaggctttatcaaagtaagacagtatgatcaaatatctatagaaatttgtggaaaaaaggctataggtacagtattagtgggacctacacctgtcaacataattggaaggaatctgttgactcagcttggatgtacattaaattttccaattagtcccattgaaactgtaccagtaaaattaaagccaggaatggatggcccaaaagttaaacaatggccattgacagaagagaaaataaaagcattaacagcaatctgtgaagacatggagaaggaaggaaaaatttcaaaaattgggcctgaaaatccatataacactccagtatttgccataaaaaagaaggacagtacaaagtggagaaaattagtagatttcagggaactcaacaagagaactcaagacttctgggaagttcaactaggaataccacacccagcagggttaaaaaagaaaaaatcagtgacagtactagatgtgggggatgcatatttttcagtacctttagatgaaggcttcaggaaatatactgcgttcaccatacctagtataaacaatgaaacaccagggattagatatcaatataatgtgcttccacagggatggaaaggatcaccagcaatattccagagtagcatgacaaaaatcttagagccctttaggataaaaaatccagacatagttatctatcaatatatggatgacttgtatgtaggatctgacttagaattaggacagcatagagcaaaaatagaagagctaagggaacatttattaaaatggggacttaccacaccagacaagaaacatcaaaaagaacccccatttctttggatggggtatgaactccatcctgacaaatggacagtacagcctataaagctgccagacaaggaaagctggactgtcaatgatatacaaaagttagtaggaaaattaaactgggcaagtcagatttacccagggattaaagtaaggcaactctgtaaactccttaggggggccaaagcactaacagacatagtaccactaactgaagaagcagaattagaattggcagagaacagggaaattctaaaagaaccagtacatggagtatattatgaccctgctaaagaattaatagctgaaatacagaagcaggggcatgaccaatggacataccaaatttaccaagaaccattcaaaaatctgaaaacaggaaagtatgcaaaaatgagggctgcccataccaatgatgtaaagcaattaacagaggcagtgcaaaaaatagctacagaaagcatagtaatatggggaaagacccctaagtttagattacccatccaaaaagaaacatgggagacatggtggacagactattggcaggctacctggattcctgagtgggagtatgttaatactcctcccctagtaaaattatggtaccaactggaaaaagaacccatagtaggagtagaaactttctatgtagatggagcagctaatagggaaactaagttaggaaaagcagggtatgttactgacaggggaaggcagaaagtcgtttccctaactgaaacaacaaatcagaaggctgagttacaagcaattcagttagctttgcaggattcaggatcagaagtaaacatagtaacagactcacagtatgcattaggaatcattcaagcacaaccagataagagtgaatcagggttagttaaccaaataatagaacagttaataaacaaggaaagaatctacctgtcatgggtaccagcacataagggaattggagggaatgaacaagtggacaaattagtaagtaaggggatcaggaaagtgctgtttctagatggaatagagaaggctcaagaagagcatgaaagatatcacaacaattggagagcaatggctagtgagtttaatctgccacccatagtagcaaaagaaatagtagctagctgtgataaatgtcagttaaaaggggaagccatacatggacaagtagactgtagtccagggatatggcaattagactgcacacatttagaaggaaaaactatcttggtagcagtccatgtagccagtggctacatagaagcagaggtcattccagcagaaacaggacaagaaacagcatactatatactaaaattagcaggaagatggccagtcaaaatgatacatacagacaatggcagtaatttcaccagtgctgcagttaaggcagcctgttggtgggcgggtatccaacaggaatttggaattccctacaatccccaaagtcagggagtagtagaatccatgaataaagaattaaagaaaatcatagggcaagtaagagatcaagctgagcaccttaagacagcagtacaaatggcagtattcattcacaattttaaaagaaaaggggggattggggggtacagtgcaggggaaagaataatagacatgatagcaacagacatacaaactaaagaattacaaaaacaaattataaaaattcaaaattttcgggtttattacagagacagcagagatcctatttggaaaggaccagccaaactactctggaaaggtgaaggggcagtagtcatacaagataacagtgacataaaggtagtaccaagaaggaaagtaaaaatcattagggactatggaaaacagatggcaggtgctgattgtgtggcaggtagacaggatgaggattagaacatggcacagtttagtaaagcaccacatgtatgtctcaaggagagctagtggatggttctacagacctcattatgcaagtagacatccaaaaataagttcagaggtacacatcccattaggggaggctagattagtaataacaacatattggggtttgcaaacaggagaaagagagtggcacttaggtaatggagcctccatagaatggagaatgagaaaatatagcacacaaatagatcctggcctggcagaccagctaattcatatgcattattttgattgttttgcagactctgccataagaaaagccatattaggacatatagttatccctaggtgtgactatcaagcaggacataataaggtaggatctcttcaatacttggcactgacagcattgataaaaccaaaaaagagaaagccacctctgcctagtgttaagaaattagtagaggatagatggaacaacccccagaagaccaggggccgcagagggaaccatataacgagtggacactagaactcttagaggaactcaagcaggaagctgtcagacactttcctagaccatggctccatgcattaggacaacatatctatgatacctatggggatacttggacaggagttgaagctataataagaatacttcaacagttactgtttactcatttcagaattgggtgccaacatagcagaataggcattctgcgacagagaagagcaagaaatggagccagtagaccctaacctagagccctggaatcatccaggaagtcagcccaaaactccttgtaataagtgttattgtaagcgatgctgctatcattgtctagtttgctttcagacaaaaggcttaggcatttcccatggcaggaagaagcggagacagcgacgaagcgctcctccaagcagtgagaatcatcaaaatcctttatcaaagcagtgagtattcaataagcatatgtaatgtttgatttatatgcaagagtagattatagaataggagtaggagcattggcaatagcactaatcatagcaataatagtgtggaccatagtatatatagaatataggaaattagtaagacaaagaaaaatagaccagttaattaaaagaattagggaaagagcagaagacagtggcaatgagagtgatggggatacagaggaattatccacaatggtggatatggagcatgttaggcttttggatgctaatgatttgtaatgggatgtgggtcacagtctactatggggtacctgtgtggaaagaagcaaaaactactctattttgtgcatcagatgctaaagcatatgagaaagaagtgcataatgtctgggctacacatgcctgtgtacccacagaccccaatccacaagaaatggttttaaaaaatgtaacagaaaatttcaacatgtggaaaaatgacatggtggatcagatgcatgaagatgtaattagtttatgggatcaaagcctcaagccatgtgtaaagttgaccccactctgtgtcactctaaactgtaccaatgctactgccagcaatagcagtataatagagggaatgaaaaattgctctttcaatataaccacagaattaagagataagagagagaaaaagaatgcacttttttataaacttgatatagtacaactagatggcaactctagtcagtatagattaataaattgtaatacctcagtcataacacaagcctgtccaaaggtctcttttgacccaattcctatacattattgtgctccagctggttatgcgattctaaagtgtaataataagacattcactggaacaggaccgtgtaataatgtcagcacagtacaatgtacacatggaattaagccagtggtttcaactcaactattgttaaatggtagcctagcagaaggagagataataattagatctgaaaatataacaaacaatgtcaaaacaataatagtacatctcaatgaatctgtaaagattgagtgtacgagacccaataataaaacaagaacaagtataagaataggaccaggacaagcattttatgcaacaggacaagtaataggagacataagagaagcatattgtaacattaatgaaagtaaatggaatgaaactttacaaagggtaagtaaaaaattaaaagaatacttccctcataagaatataacatttcaaccatcctcaggaggggacctagaaattacaacacatagctttaattgtggaggagaatttttctattgcaatacatcaagcctgtttaataggacatatatggctaatagtacagatatggctaatagtacagaaactaacagtacacgaaccatcacaatccactgcagaataaaacaaattataaacatgtggcaggaggtgggacgagcaatgtatgcccctcccattgcaggaaacataacatgtatatcaaatatcacaggactactattgacaagggatggaggaaaaaacaatacggagacattcagacctggaggaggaaatatgaaggacaattggagaagtgaattatataaatataaagtggtagaagttaagccattaggagtagcacccactaatgcaagaaggagagtggtggagagagaaaaaagagcagtgggaatgggagctgtgttccttgggttcttgggagcggcaggaagcactatgggcgcagcatcaataacgctgacggtacaggccagacaattattgtctggtatagtgcaacagcaaagcaatttgctgaaggctatagaggctcaacagcatatgttgaaactcacggtctggggcattaaacagctccaggcaagagtcctggccttggaaagatacctaaaggatcaacagctcctagggatgtggggctgctctggaaaactcatctgcaccactaatgtatattggaactctagttggagtaataaaacttatggtgatatttgggataacatgacctggatgcagtgggagagagaaattagcaattatacagaaataatatatgaattgcttgaagaatcacaaaaccagcaggaaaagaatgaacaagatttactagcattggacagatggaacagtctgtggaattggtttaacataacaaattggctgtggtatataaaaatattcataatgatagtaggaggcttgataggtttaagaataatttttgctgtgctttctttagtaaatagagttaggcagggatactcacctctgtcgttgcagacccttatcccaagcccgaggggaccagacaggcccggaggaatcgaagaagaaggtggagagcaagacagaaacagatcaacgcgattagtgagcggattcttagcgcttgtctgggacgacctgcggagcctgtgccttttcatctaccaccgattgagagacttcatattaattgcagcgagagcgggggaacttctgggacgcagcagtctcaagggactacggagaggatgggaagcccttaagtatctgggaagtcttgtgcagtattggggcctggaactaaaaaggagtgctattagtctattggataccctagcaatagcagtaggtgaaggaacagataggattctagaatttgtattaggaatttgtagagctatccgcaacatacctacaagaataagacagggctttgaaacagctttgctataaaatggggggcaagtggtcaaaaagcagtatagttggatggcctgatgtaagagaaagaataagaagaactgatccagcagcagagggagtaggagcagcatctcaagacttagatagacatggggcacttacaattaacaacacagccgccaataatgctgattgtgcctggctggaggcacaagaggaggagggagaagtaggctttccagtcagacctcaggtacctttaagaccaatgacttataaggaagcattcgacctcagcttctttttaaaagaaaaggggggactggaagggttagtttactccaagaaaagacaagagatccttgatttgtgggtctataacacacaaggcttcttccctgattggcaaaactacacaccgggaccaggggtcagatatccactgacctttggatggtgcttcaagctagtgccagtcgatccagaggaagtagaagaggccaataaaggagaaaacaactgcttactacaccctatgagccagcatggaatggatgatgaggacagagaagtactaaagtggaagtttgacagtcagctagcacgcagacacatggcccgcgagctacatccggagtggtacaaagactgctgacacagaagggactttccgctgggactttccactggggcgttccagggggagtggtctgggcgggactgggagtggccaaccctcagatgctgcatataagcagctgcttttcgcctgtactgggtctctctaggtagaccagatctgagcccgggagctctctgactacctagggaacccactgcttaagcctcaataaaagcttgccttgagtgctctaagtagtgtgtgcccgtctgttgtgtgactctggtaactagagatccctcagaccctttgtggtagtgtggaaaatctctagca

SEQ ID NO: 141 - DNA, 1485 bp, Human immunodeficiency virus 1
atgggtgcgagagcgtcaatattaagagggggaaaattagataaatgggaaagaattaggttaaggccagggggaaagaaatgctatatgataaaacacttagtatgggcaagcagggagttggaaagatttgcacttaatcctggcctcttagaaacatcagaaggctgtagacaaataataaagcagctacaaccatctcttcagacaggaacagaggaacttagatcattatataacacagtagtaactctctattgtgtacatgaagagatagaagtacgagacaccaaagaagccttagacaaactagaggaagaacaaaacaaatgtcagcaaaaagcacagcaagcagaggcggctgacaaaggaaaggtcagccaaaattatcctatagtacagaatctccaagggcaaatggtacaccagcccctatcacctagaactttgaatgcatgggtgaaagtaatagaagagaagggttttaacccagaggtaatacccatgttttcagcattatcagaaggagccaccccacaagacttaaacaccatgttaaatacagtagggggacatcaagcagccatgcaaatgttgaaagataccatcaatgaggaggctgcagaatgggatagattacatccagtccatgcagggcctattgcaccaggccaaatgagagaaccaaggggaagtgatatagcaggaacaactagcaaccttcaggaacaaatagcatggatgacagctaacccacctatcccagtgggagaattgtataaaagatggataattctgggattaaataaaatagtaagaatgtatagccctgtcagcattttggacataaaacaagggccaaaagaaccctttagagactatgtagaccggttctttaaaactttgagagctgaacaagctacacaagatgtaaaaaattggatgacagacaccttgttgacccaaaatgcgaacccagattgtaagaccattttaagagcattaggaccaggggctacattagaagaaatgatgacagcatgccaaggagtgggaggacctagccacaaagcaagagtgctagctgaagcaatgagccaagtaaatcatccaaacataatgatgcagagaaacaattttaaaggaccaaaaagaattgttaaatgcttcaactgtggcaaggaagggcacatagccagaaattgcagggcacctaggaaaaggggctgttggaaatgtggaaaggaaggacaccaaatgaaagactgtactgaaaggcaggctaattttttagggaaaatttggccttcccacaaggggaggccagggaatttcatccagaacaggctagagcccacagccccaccagcagagagtttcaggttcgaggagacaacccccagtctgaagcaggagccgaaggagagggaaccacccttaacttccctcaaatcactctttggcagcgaccccttgtctcaataa

SEQ ID NO: 142 - DNA, 3003 bp, Human immunodeficiency virus 1
ttttttagggaaaatttggccttcccacaaggggaggccagggaatttcatccagaacaggctagagcccacagccccaccagcagagagtttcaggttcgaggagacaacccccagtctgaagcaggagccgaaggagagggaaccacccttaacttccctcaaatcactctttggcagcgaccccttgtctcaataagagtagggggccagataaaggaggctctcttagacacaggagcagatgatacagtattagaagaaataaatttgccagggaaatggaaaccaaaaatgataggaggaattggaggctttatcaaagtaagacagtatgatcaaatatctatagaaatttgtggaaaaaaggctataggtacagtattagtgggacctacacctgtcaacataattggaaggaatctgttgactcagcttggatgtacattaaattttccaattagtcccattgaaactgtaccagtaaaattaaagccaggaatggatggcccaaaagttaaacaatggccattgacagaagagaaaataaaagcattaacagcaatctgtgaagacatggagaaggaaggaaaaatttcaaaaattgggcctgaaaatccatataacactccagtatttgccataaaaaagaaggacagtacaaagtggagaaaattagtagatttcagggaactcaacaagagaactcaagacttctgggaagttcaactaggaataccacacccagcagggttaaaaaagaaaaaatcagtgacagtactagatgtgggggatgcatatttttcagtacctttagatgaaggcttcaggaaatatactgcgttcaccatacctagtataaacaatgaaacaccagggattagatatcaatataatgtgcttccacagggatggaaaggatcaccagcaatattccagagtagcatgacaaaaatcttagagccctttaggataaaaaatccagacatagttatctatcaatatatggatgacttgtatgtaggatctgacttagaattaggacagcatagagcaaaaatagaagagctaagggaacatttattaaaatggggacttaccacaccagacaagaaacatcaaaaagaacccccatttctttggatggggtatgaactccatcctgacaaatggacagtacagcctataaagctgccagacaaggaaagctggactgtcaatgatatacaaaagttagtaggaaaattaaactgggcaagtcagatttacccagggattaaagtaaggcaactctgtaaactccttaggggggccaaagcactaacagacatagtaccactaactgaagaagcagaattagaattggcagagaacagggaaattctaaaagaaccagtacatggagtatattatgaccctgctaaagaattaatagctgaaatacagaagcaggggcatgaccaatggacataccaaatttaccaagaaccattcaaaaatctgaaaacaggaaagtatgcaaaaatgagggctgcccataccaatgatgtaaagcaattaacagaggcagtgcaaaaaatagctacagaaagcatagtaatatggggaaagacccctaagtttagattacccatccaaaaagaaacatgggagacatggtggacagactattggcaggctacctggattcctgagtgggagtatgttaatactcctcccctagtaaaattatggtaccaactggaaaaagaacccatagtaggagtagaaactttctatgtagatggagcagctaatagggaaactaagttaggaaaagcagggtatgttactgacaggggaaggcagaaagtcgtttccctaactgaaacaacaaatcagaaggctgagttacaagcaattcagttagctttgcaggattcaggatcagaagtaaacatagtaacagactcacagtatgcattaggaatcattcaagcacaaccagataagagtgaatcagggttagttaaccaaataatagaacagttaataaacaaggaaagaatctacctgtcatgggtaccagcacataagggaattggagggaatgaacaagtggacaaattagtaagtaaggggatcaggaaagtgctgtttctagatggaatagagaaggctcaagaagagcatgaaagatatcacaacaattggagagcaatggctagtgagtttaatctgccacccatagtagcaaaagaaatagtagctagctgtgataaatgtcagttaaaaggggaagccatacatggacaagtagactgtagtccagggatatggcaattagactgcacacatttagaaggaaaaactatcttggtagcagtccatgtagccagtggctacatagaagcagaggtcattccagcagaaacaggacaagaaacagcatactatatactaaaattagcaggaagatggccagtcaaaatgatacatacagacaatggcagtaatttcaccagtgctgcagttaaggcagcctgttggtgggcgggtatccaacaggaatttggaattccctacaatccccaaagtcagggagtagtagaatccatgaataaagaattaaagaaaatcatagggcaagtaagagatcaagctgagcaccttaagacagcagtacaaatggcagtattcattcacaattttaaaagaaaaggggggattggggggtacagtgcaggggaaagaataatagacatgatagcaacagacatacaaactaaagaattacaaaaacaaattataaaaattcaaaattttcgggtttattacagagacagcagagatcctatttggaaaggaccagccaaactactctggaaaggtgaaggggcagtagtcatacaagataacagtgacataaaggtagtaccaagaaggaaagtaaaaatcattagggactatggaaaacagatggcaggtgctgattgtgtggcaggtagacaggatgaggattag

SEQ ID NO: 143 - DNA, 579 bp, Human immunodeficiency virus 1
atggaaaacagatggcaggtgctgattgtgtggcaggtagacaggatgaggattagaacatggcacagtttagtaaagcaccacatgtatgtctcaaggagagctagtggatggttctacagacctcattatgcaagtagacatccaaaaataagttcagaggtacacatcccattaggggaggctagattagtaataacaacatattggggtttgcaaacaggagaaagagagtggcacttaggtaatggagcctccatagaatggagaatgagaaaatatagcacacaaatagatcctggcctggcagaccagctaattcatatgcattattttgattgttttgcagactctgccataagaaaagccatattaggacatatagttatccctaggtgtgactatcaagcaggacataataaggtaggatctcttcaatacttggcactgacagcattgataaaaccaaaaaagagaaagccacctctgcctagtgttaagaaattagtagaggatagatggaacaacccccagaagaccaggggccgcagagggaaccatataacgagtggacactag

SEQ ID NO: 144 - DNA, 291 bp, Human immunodeficiency virus 1
atggaacaacccccagaagaccaggggccgcagagggaaccatataacgagtggacactagaactcttagaggaactcaagcaggaagctgtcagacactttcctagaccatggctccatgcattaggacaacatatctatgatacctatggggatacttggacaggagttgaagctataataagaatacttcaacagttactgtttactcatttcagaattgggtgccaacatagcagaataggcattctgcgacagagaagagcaagaaatggagccagtagaccctaa

SEQ ID NO: 145 - DNA, 306 bp, Human immunodeficiency virus 1
atggagccagtagaccctaacctagagccctggaatcatccaggaagtcagcccaaaactccttgtaataagtgttattgtaagcgatgctgctatcattgtctagtttgctttcagacaaaaggcttaggcatttcccatggcaggaagaagcggagacagcgacgaagcgctcctccaagcagtgagaatcatcaaaatcctttatcaaagcaacccttatcccaagcccgaggggaccagacaggcccggaggaatcgaagaagaaggtggagagcaagacagaaacagatcaacgcgattag

SEQ ID NO: 146 - DNA, 372 bp, Human immunodeficiency virus 1
atggcaggaagaagcggagacagcgacgaagcgctcctccaagcagtgagaatcatcaaaatcctttatcaaagcaacccttatcccaagcccgaggggaccagacaggcccggaggaatcgaagaagaaggtggagagcaagacagaaacagatcaacgcgattagtgagcggattcttagcgcttgtctgggacgacctgcggagcctgtgccttttcatctaccaccgattgagagacttcatattaattgcagcgagagcgggggaacttctgggacgcagcagtctcaagggactacggagaggatgggaagcccttaagtatctgggaagtcttgtgcagtattggggcctggaactaaaaaggag

SEQ ID NO: 147 - DNA, 261 bp, Human immunodeficiency virus 1
atgtttgatttatatgcaagagtagattatagaataggagtaggagcattggcaatagcactaatcatagcaataatagtgtggaccatagtatatatagaatataggaaattagtaagacaaagaaaaatagaccagttaattaaaagaattagggaaagagcagaagacagtggcaatgagagtgatggggatacagaggaattatccacaatggtggatatggagcatgttaggcttttggatgctaatgatttgtaa

SEQ ID NO: 148 - DNA, 2541 bp, Human immunodeficiency virus 1; identical to SEQ ID NO: 27

SEQ ID NO: 149 - DNA, 624 bp, Human immunodeficiency virus 1
atggggggcaagtggtcaaaaagcagtatagttggatggcctgatgtaagagaaagaataagaagaactgatccagcagcagagggagtaggagcagcatctcaagacttagatagacatggggcacttacaattaacaacacagccgccaataatgctgattgtgcctggctggaggcacaagaggaggagggagaagtaggctttccagtcagacctcaggtacctttaagaccaatgacttataaggaagcattcgacctcagcttctttttaaaagaaaaggggggactggaagggttagtttactccaagaaaagacaagagatccttgatttgtgggtctataacacacaaggcttcttccctgattggcaaaactacacaccgggaccaggggtcagatatccactgacctttggatggtgcttcaagctagtgccagtcgatccagaggaagtagaagaggccaataaaggagaaaacaactgcttactacaccctatgagccagcatggaatggatgatgaggacagagaagtactaaagtggaagtttgacagtcagctagcacgcagacacatggcccgcgagctacatccggagtggtacaaagactgctga

SEQ ID NO: 150 - protein, 33 aa, Artificial Sequence
  Description of Artificial Sequence: Synthetic polypeptide
TRPNNNTRKSIRIGPGQTFYATGDIIGNIRQAH

SEQ ID NO: 151 - protein, 79 aa, Artificial Sequence
  Description of Artificial Sequence: Synthetic polypeptide
MRVMGIQRNYPQWWIWSMLGFWMLMICNGMWVTVYYGVPVWKEAKTTLFCASDAKAYEKEVHNVWATHACVPTDPNPQE
